United States Patent Application Publication US 2024/0180975 A1 - sequence listing, part 2

SEQ ID NO: 1 - DNA, 5342333 bp, Flavobacterium sp. (residues 1,780,779-3,561,556 of 5,342,333)
  misc_feature (1)..(10): Whole genome sequence of Flavobacterium sp. bacterial strain with Accession Number No. I-5481 deposited at the CNCM on January 24, 2020 (UGB 4466)
  misc_feature (13753)..(13851): n is a, c, g, or t
  misc_feature (749614)..(749623): n is a, c, g, or t
  misc_feature (862940)..(863039): n is a, c, g, or t
  misc_feature (899105)..(899114): n is a, c, g, or t
  misc_feature (1197031)..(1197128): n is a, c, g, or t
  misc_feature (1435433)..(1435531): n is a, c, g, or t
  misc_feature (1958084)..(1958183): n is a, c, g, or t
  misc_feature (2393366)..(2393465): n is a, c, g, or t
  misc_feature (2989436)..(2989533): n is a, c, g, or t
  misc_feature (3448526)..(3448623): n is a, c, g, or t
  misc_feature (3525681)..(3525779): n is a, c, g, or t
  misc_feature (3751461)..(3751555): n is a, c, g, or t
  misc_feature (4214851)..(4214949): n is a, c, g, or t
  misc_feature (4574523)..(4574622): n is a, c, g, or t
  misc_feature (4634982)..(4635078): n is a, c, g, or t
  misc_feature (5147970)..(5148068): n is a, c, g, or t
  misc_feature (5289451)..(5289460): n is a, c, g, or t
gcattgccattggtccatgttcatcggcatccaattcgatatgtctttcaaagtaatataaaagtttacttagatccgtttcaggaagattcttctggaagtttttcaggattgcggtaaacatactcggaatcaaatcttctcttccgaaagtaaatgctgccgcaatttgatgaggctttccttcttcaatgactctaaaagtaaagtccaggaaagcttttgtatcaggatgtaaggagctttgttttatggcaacaaaaatattatgcaaggagtttacttcggctaaaaagtggttgattccgcttgtatcggcaccacagtcttccatggcttcaatatacatttcgtagtgactttgtctttttccatcaatacttaaatcggtttcttctgccaaaacgatttcgttgattaagtatcttgtttcaggattttttgtcgcgaaccaaggagtagaagtacaggtaagcttagattgtaatgcttttaataaggacataaaatcccaaacagcgaaaacatgagtttctaaaaaacgatgtaagtcatcgatattttggattttattgtataatgaatgttgtagaagttgatctttttggggttgaatgctattgtttatagtttcaatattcattttcgaattttttatgcaaatataaaaagcttcccgttaagaagaagctttttgtattggttttgtatatattttaataaatattcattatttaaatgctggaattccagttacatccatacccgttattagtaaatgaatgtcgtgagttccttcgtaagtaataacactttcgagattcatcatgtgacgcatgatcgaatattcgcctgtaatacccattccgcccagcatttgtctggcttcacgtgcgatatgtatggccatatcgacattgttgcgttttgccattgagatttgtgtggttgtagctcttccttcgttgcgtaaaacacccaggcgccaggttaataactgtgcttttgtgatttccgtaatcatttcagctagttttttctgttgcaattgcgttcctccgataggtttcccaaattgaattctttctttagaataacgtaaagcagtatcgtagcaatccattgccgctccaatagctccccaggcaattccgtatcgtgccgaatctaagcatccaagaggtgcgccaagaccggatttgttaggtaataagttttctttaggaacctttacattatcgaagattaattctccggttgaagaggcgcgcaaagaccatttattatgtgtctcaggagttgtaaagccttccattccgcgttcaacgattaggccgtggattcttccttcttcattttttgcccaaacaattgcaatatcggcaaaaggagcattagaaatccacattttggcaccatttaaaagataatgatctcccatatctttaaaattagtgatcatgcttccggggtcagaaccgtgatctggttcagtcaaaccaaagcatcccatgaattctcctgtagccagtttgggtaaatatttcattcgctgttcttcgtttccatatttccagataggatacattactaaggaagactgaacggatgaagtcgatcgaacaccggaatctccgcgttctatctcctgcataattaaaccgtaagaaatctgatccagacctgcgcctccgtattctaccggaatatacggtccgaaaccaccgatttctccgagtccttttataatttgtgtagggaatgctgctttttgagcatattcttctataattggagaaacttctctcttgacccaggctcgtgccgattcgcgaactaatttgtgttcgtctgtcaataagtcatctaagttatagtaatctggtgcttgaaataggtctggtttcatttttgatagttttataatacaaatctacgcaataaaaatataacaaaatacggttaaattgttatatttctataaatggtaaagaaggaaaatagtataaacacgaattaattttagtttattgtgaatttataagctatttttgagattcaaaaaacgaattgaatgaggctgatcatctcttttatactcttttttgttgtaaacgtcgctgtttctcaggagaaaaaggtttttacggaacaagagtacttaatattacaagacaaaattcgactaacggcaaatgctaatgttgacagttcgatcgtatatgctagtcagctggcaagatctaataataataaacatctggcttttgcaaatgctgcattgtcttatttgattcagttaaaaggaaatgcagtaaaatctaaggaaaagtaccagttagccttaaattacttagataaaatgccggatgataaagaaaaaactcaacttcggtcttatttgtataattatgccggcttatcagaatggaaaagagagaattacagtgatgcaatcgaaaattatcaacaaggaataaaactctctataaagattggggatattattcaaattgttaagtttaagagtaatattgcggctataaatgttgctgtaggtaattatagattagcgattaaggatttgcggagtctcaatgattttgtggataaaaaccagagcgtttataccaaacagcagtaccttaataataagagtaacatcaatcttagtttggcaggatcatatgaaagcttttatatgaaagaccctaagaagaaggttttacttgactctgcggagtatttttatcaaaaaacgatcagttattctcaaaattttccggacaataaaattgtggcgaaattaagtttagggaatatttacggagagctgaaagaatacaaaaatgccgaaaaaacgtattacgacatcatctttctggccaatcaaaataatatgcaggaaatcttatgtactactaattataatctaggagacttgtattataatatcaagaagtatgataaggcattagtgttttttaaaaaatcagattctattggcgagataacaaaaaccaatcaggtagatcatctgaagtcaaattattatcaggcaaagatttataacatactaaaagagcctgaactggcttataaacattcaaaaatttaccttgataattacgaaaaattggaatcaaaattaaatgatgagattctggaagtaaattataaacttggagtaggagatttgaccagtgagatggttaccattcaggagaagtataaatacgacgtttttctgaataaagctctgaaggtcttttatgttgttttatttatagggatcgtattcttgctgataaaaaacatacgggataaaaataaagcacataaaaaaatgaatgctttaatagaagagtttaaagctaatttagagaagaaaaacgaacctgaaccagagattgctgctctggagtctgaggagttacaacttaagaaagagaatgtcaatttaagtattgatgaggcaaaagagaataaaatagtagaaaaattgctggctttagaaagtaaacaggaatttttgcacgctgattttactttgccttatgtggctaagaagataaaaacaaatactacttatttgtcttatgtggttaacaaacgatttggtaagtcttttggagaatattcgaatgagttgaaaattaattatgttattaatgaaatgattacgaatcatatgtatcgtaaatattcaactcaggcgatagcagaaagtgtaggtttcaaaaatgcagtgtcatttgctaaatcatttcgcaaaagaactggagtgtctccagctcagtttgcgaataatatttaaatttttttttagagttttattaaggaatttcgtcagtacttcctttcccattccctctggaagggtcaccgtcatcatcacctccaaaaattgtttgttgctcttttcttgataatttttcgtttccaaaatcttcgaattttatttttttagttttcattgttataggtttattagttgtgtagatccgttgccatttcctctattactatcgttgtcacctccacgaaccgttttttgttctttttttgaaagtgtattgcttttgaaattttcgaagtttaattttttatttttcatgatttgatttttttaaatgattaattagatccttttccattccctctacttgggtcacctggaataatagattcgtctcctccctgaacagttttttgttctttttttgacagtttttccgattgaaaatcttcgaatttttgtgctcgatttgccatgtttatttgtattaggattattgatatatcaaaactatacaaaaaggaaaacgcttaatcgagaatagggtttttggggtttcggacaaattattttaatgataaaatattgataatcagttgattgtgattttattcagactgatataatttataaattgtatgtagtataattaataaaatgtgtactactagcgtttttttctcaataaaaacaacaatctttgcagtgtaattatgattttaaagactcgaaaagatgttaaaacttgtccaaaaatttctacaaataaacaagtactcggagattaaaaatgagtttaaagatttgttcctttctcatccaaattatcctagtttgtttgcgataacagattctctagatttactgtctgtagagaatgctgcgatacgagttccgaaagagcaaatagtagatttgccttcaaattttttggcttatttcaaagaagagttaatattagtggaaaaggcaaagaattttgttcgaatcaatacgatgaaaaaaggaagtcagaaaatggcttatgaaaagtttttattagactggaatggggttatagttgcaattgaaccaaacaatgttatagcaagagacagaataaaagttgaattcagctggttgaaatatggtttgccacttttgttggtagttggattgtcatttttttataatacatacaatttatttagcctgttttttttaacaacatcaattttaggactcattgtaagtgttttcattgttcaggaaaaactgggatttaagaatagtatcatttcaaaactttgcaattttagttctaactcttcctgtagctctgtaatcaatagtaaagaggataatgaaagcaaatggattagctttcctgacttgccactaatgttttttggagccagtttgattgcaattctggtaaaaccactggagtcctcgattttcataggttttttaagcttattagcgatacccgttattgtgtcttccatttggattcaaaaatttgaaattcaaagatggtgtgtaatgtgcttagtggtgtcttctttgatttttgtacaaagtgctatatggtttgcgtcagatttgtttacgttgagttttggttttgcggaaatttttccattcctgttctcattggcacttcttgttcctatttgggcagttttgaaaacaattataaaaaacatcttaggtactgaaagttcacttaaagagatgaaaaagtttaaaagaaattattctttattgaacttcttgtctaaaaaagtgcctcatataaatggacttgatgatctaagaggattgcattttggaaatagaaatgcggccgttaagttatccgtaatcatcagccctagttgtggacattgtcataaaacatttcaggaggcgtttgatttagtattgagatttccggataagatacacttgaatgtcttgtttaatgtaaatcctgagaatgccgaaaatccatataaagtagtagttgaaagacttttaaccataaacagatctacaccgggaaaaacggttgaggctatttcggactggcatattaaaaatatgagtcttaagaaatggttgaaaaaatggactgttgattctgtaagtatgatgataacacaggaaataaacaaacaatatgaatggtgttctaaaaatgattttaattacacacctgttaagattgtaaatgataaaattttcccggcagaatatgaactaggagagttaaaatactttttaaacgattatatcgaagagaaggaagaggttgttttggaaaaaacagcatagtatctaaagaaagttacaacagacagaagcttcagctgtcttaaaatgattgaagtaggagttcaaaaaacaaaaacctttagttatgttaaaaatcattttaaacttagaaggtgctcaagagctaagtgcattcgagcaaaaaagcatgataggagggcagccaattaatccgcctaaaagatgttgcatttgtccgggtaaaggttcgtctactcttgtaacgtgtgattcgatttgttcgaatggtacaataccggcagtgcttgaggattgtttatagtcttgtctgatgtaaaaaatgtttttagattcatgtatagacaaaaaagaaggactctcgggtcgcgtttttggaattaattatttatagcgttttaatagaagtacgaaatagccttttttagaatttagtcatgttttttttaatttgtaggcgctcgatcgtggaacattgagcaaatttccccacattgatgattggtgtagggattcttaggaaattggtcactgagttgattttaattggttagggttaaccagtgccatgtcctaaagaaattgtatttctaatagatatgtttttaaatactctaacagagaagatttgtttcttctctgtttttttttggattaacccatcctttcgtaatgaacttaaagaaatcacttgtgtcgtttaattgtttaagatggttaagaatggaaataagatctttaaatggtcaggtagcctcaaaccccaataaaaaaatcttgtaaaatccttttttttaggatcattgttgtattttaactataaatcagaaggaaaaacaaataattgcgattttttggcggataaatattatatttttgtaaggcagataatggtaagattgtgtgtgcataaatgattaaccctaaattaaattgaaaaaattcaccaattataaacaggccgattataaagattgtgggccgacgtgtttaaaaataatagcgaaacattacggcaaaacaatcaacattcaggagttgagagacatcagtgaaacaactcgtgaaggaagtaatttgctttttttgagtgacgctgacgaataaataggttttagaactttaggtgtaaaattaaatctcgagcgattagaagaggcgccgcttccttgtatcctgcattggaacaaaaatcattacgtagtactttacaaaattaaaagaaatacctactatatttctgatcctgcttttggcttgatcgaatacaacaaagaagattttattaaattctggatcggaaacaatgcagatgaatctactcaggaaggaatagcattattgattgaagcgactcctaaatttttccaatctgattttgataaagaagacaatcatggactcggatttgggttgttggcacaatacgtgcttcggtacaggtcatttctcatacaattaagtatagggttactggccagtagtttattacagcttatttttccgtttttaacccaaagtattgtggatgtcgggattcaaaatcagaacattcattttatttacctgattctttttgctcaattgttcctttttgccggaaggacaggtctggaacttatcagaagctggattttattacatctttctacccgaataaacatttctcttatttcggatttttttattaaattaatgaatctgcccatttcgtttttcgatgtaagaatgactggcgacattatgcagcgtattaatgaccatcgcagaattgaacgaattttgacaacatcatctttgaacgtcttattttctgtgatcaatatgtttgtgatgggaggtgttttggcttatttcaatctgaagatctttctggtgttttttgccggtagcttactttatttcggatggattactttgttcttaaaaagaagagaagtactcgattacaagcgttttgcagaggtttccagtgagcaaaacaaagtgatggagcttatcaacggaatgcaggaaataaagctgcacaacgccgaaaaacaaaagcgctggggatgggaatacatacaggcaaggctttttagagtttccataaaagggcttgttttagagcaaacacaaactataggttcttctgtaattaatgaattaaaaaatatcttcattatattcctatcggcaaaactggtaatcgatggctccattacactggggatgatgctggcaattagttcgatagtagggagtttaaacgggccaattacgcagcttatagaattcgtcagggagcttcaggatgcgaagatatcattggccagattgtctgagattcatgagaaagaagacgaaacgcagcaagaagtctatcagacgagtgatgttccttttgattcggatattgatattaataacctttcctatcgatatttaggttctgatattcctgttctggaagatctaacactgaaaatcccggccaataaagtaacggcaatagtaggagtcagcggaagcggtaaaacaactttaatgaagctcttattgaaattctatgaacctgaaaaaggggaaataaacatcggaaatgcacaattgaaaaatatttcgcaaaaagcatggagatccaatatcggcgccgttatgcaggaagggtttatttttagtgataccattgctaataatattgcaattggtgtcgataaagtagataaagaacgtttggtctatgctgctgatgtagccaatataaaagaatacgtttcaggtttaccattaggatacaataccaaaattggtgccgaaggactagggatgagtaccggacaaaagcagcgtttgttaattgcaagggctgtttataaaaacccggaagttttgttttttgatgaagctacatcggcattggacgcgaataatgaaaaagaaattatgcaaaaactggatattttcttcaaagacaaaacagttgtggttatcgcccatcgcttgagtactgtgatgaatgcagatcaaattgtggttttagataaaggaaaaatcatcgaaattggcagtcattctgttttggtagaacaaaaaggaaattattttgaactggttaagaatcaattacaattaggaaattaaaacatggcagaagatactacatttgaactaagaagcgaagaagttcaggatattctaaccaaagtaccgcattggatgattcgttggggaaccgttttgatatttgtcattattgtgatgctttttttcgtgtcctggtttatcaaatatcctgatgttgttactacccaaattgtaattacaaccaatattccgccagagaagatcgtttcgaaatcatcgggtcgtattgaggcaattttagtaaaagacaaatcgattgtttcaaaaaacagtacacttgctgttattgaaaacacggcaaattacaaagatgtttttttgttgaaaaaaatcgttgacgaatataatatcaatgatcccaagaaagcctttcctttcgaactgttgaaaaatactcagttaggagagattgaaagtgcttttgctgtttttcagaaagattatcaggcggaacaactaaataaaaatttgcagccttttgaagtagaaaaccgggcacaggtttctgaaaaaattcagattaaagacagattggagattttgcagcagcaaaaagtgatcaatgaaagtgaactacagcttcagaaaaatgaaatggcaagatttgaaacattgttcaataaaggaatcatttctgcacaggaaatggaggctaaaaaactggggtatctccaggcgcaaaaaaattataaaacccttttgtcttccatttctcagttaaagtcggctttaattaccaatactaaattgagtcagaactcacaaatcagcgggactaaagaagaagttactttaggaagaaatatggcgcagtctttttatcagcttaagaaagtgataaaagattgggaattggcctatgctttaaagtcatcggtgagtggggtggttacttttttgcagatctggacagagaatcaaacgatcaatattggggataatgtcttctcgattattccggatagcaaaaatggttttgtaggtaaggtaaaagcaccggcattgaattcagggaaaataaaagtaggtcagatggtgaacatcagattagcaaattttcccgacagagaatttggagtgttaagaggaaagatccaaaatatctctttggttcctgataaagatggaaatttattgttggatgtagcgcttcccaacggattggaaacgtcctataaaaagcaaatcgtttttcagcaggaaatgaaaggaagtgcagagattgtgaccgaagatttacgtttaatcgagcggattttatatcagtttaagagtctttttgagcaggtttaaaattttaaataaaaatctttagtaagatcgatatactgaggagtataaacgtgtcggtccatttctattgttaattcatcgacttcaggttgtgaggtttcgttacggctaaaagccaaaaggctacgttttacaacagctgtaggggtgccttttacgcgcgtaattttgatggggtataattctgattctttggctaaggcaataaatttttcttcttctttaaaaggaagaattatggcaagtattccattttcagataaaagtaaatcggctgcttcgactaattcttcaaaaggcattgcgtcctgaaagcgcgctaaatctcgttgttcgttttcgcttttataatcttcggcataaaagggtggattcgaaacaatcagatcatattcgtcttccggttcttctataaattcatccaaacctgcatgaaaacaaaataaacggtctccccaaggtgagttttcaaaattttctactgcttcttcatacgcatcttcatcaatttcaagagcgtcaatttgttctgcatttgttctttgtgccagcattaaagcgataatcccggttccggcaccaatgtctaaaacactaaatggattgtgatttataggtgcccaagcgcccagtaaaacaccatcagtacccactttcatagcggttttgtcttgtagaactgaaaattgtttgaattgaaacatcttgatttgtgattgaagattaacgatttttaatttcagatggaataggtaataatgatgacaagatttttaattgcaagagtaatcaagtcagtctaaaaatccagcaatctaagtcggtctaataatctaattaaaggtacatctccactaaaccttcaggaagattcatgataacctttttgttttcacggtctatttttacaaggaattgatcgatcatcggaattaacatttcgacttcgccattcaaaacttcaaaaagaggttgtgctgtcgtatcgtttacggcagctatttttccaaaaacacctaaacgttggtcttcgatttcaaaaccgattacttcgtggaaataaaatttgttgcccgaaagttttggcaacatgcttaaaggaagataaatcgcattaccaagaagggcatctgcatcttcttctgtgtttacatcttcaaaacgaattctaagaaagtcgtttttgtgcaaagaacttgtttcaataaaaaaaggaaccaagtgtttgttgcattcaacaaacactgattccagattttcgtataactcaggttcgtccgtgtctaaataagccagaacttcacctttgaaactaaattttttagcgattttacctaaataaaaacattcttctttacgcattctcgctagctaaaattatgcttcagttgtttcgttattctcttcagtagcagtttcttcagttgaagcttcaacttcagcaacttcttctgtagcttcagcagcagtagcagcagcaattgcgtcagcttcagcttgagcagcagcagctaaacgtttagcgttaacttcttgttctgcttttaaagctttagctttaacatcagcttgtgcttttgataaaccatcttttttagcatcaacttttccagttttagcttctaaccatgcagctaatttagcgtcagcttgctcttgagtcaaagctcctttacggatacctccatcaaggtggtgtttcaataaagctcctttgtaagaaagaattgctctagcagtatcagttggttgtgcaccattgtgtaaccatttaactgcactatcaaggtttaagtcgatagttgccgggtttgtgtttggattgtaagtaccgattttctctaagtatttaccatctctttttgagcgtgcatctgcagctacaacccagtaaaaaggttttccttttttaccgtgtctttgtaatctaatttttactgacataatcgtatgattaaattttgaggtactcgacccctgttaattaagggcgcaaagatataatttttttatgaattatacgttcgaaatcatattaaatgcatttcaggtgtatttctgaggcatttatgtcattttaacttcattttttaaataattatcttaattgaggttatttttgcctcaaatttactgtgatatgaaaaaaataatttctttagtattattactttttattgtttctgcttgttctgaagatataaaatttaataatccggccttccaaagtttaaaagaaaacgtgttttggcgcgctacaacctataatgcttatagctctgtgggcggcagtattgttattgaaggtgatttgggatttgagaaagtagttttaaaagttccgaatacaggagtgcagacttatgctcttggacgtgacaatatcacgactgcaaattacactaatacgcagccgtcgcaatcatacagtttctctaccggtacggatagggggcatgggctaatcgtgattactgagtttaatgccgagaataaaacaatttcaggaacctttaagtttgacgctctgaacgaggataaaaaagatactgaaaagccaaaaattagttttaccgaaggtgttttttacaaaattccaatttcggcaacatctgagaattagaaatttaatttgtcgtagtttggttttattgagatctatttttttaaatcaaaataaaaacataaataaactaatatatagtagattacagaaaaataaagttacatttgctacattattataaataagtacatatgaacatttttgttggaagccttccattcagtattgaggaagcagatttaagagagtctttcgaggcttacggagcagtagattcagttaaaattattactgataaatttactggaagaagcaaaggatttggtttcgttgagatgccaaacgatagcgaggctcaaaaagcaattgatgaattgaacggagctactgttcaaggtcgttcaattgttgttaataaatctgaaccaaaacctgaaggtgaaagaagaagcttcaataacaaccgtggaggtgattctcgcggaggttacggaaacaaccgtggtggaaatgaccgtggtggtaacagaggaggatattaatatttttttctaaatatacaaaagggatcaacttgcgttgatccctttttttgtttcatgtttttttgttccacgtttcaggtttcacgttccaacaacctgaaatctgaaacttgaaactaaaataaactataagttagctacaagccagtctccaacttcactggttttataagctttagtgccttttggagccagatcttcggtaacaattccctgttctaaggattggtttacaactgctctaatggcttcggcttcgtcttttaatccgaaagcatcttcaaacatcatggcggctgataaaatagtagccagcggatttgcgatattcaatcctgtagcttgggggtaagatccatgaattggttcgtaaagagaagtgtgttctccaacagaagcagaaggcattaatcccatagagcccgagattacagaagcttcatcagttaaaatatctccaaataaattctctgtaattagaacatcataagaattaggccattgaaccaatcgcatggcaacggcatcaacaaactcgtaagatacggtaacttccggatagtctttttccattgcctgtactgtttctctccataaacgagaagtttccagaacgttcgccttgtcaacacagcataattttttgctgcgggtcatggccagttcaaagcctttttttgccagacgttgtacttcagctctggtataaacacaattgtcaaatgctgtgtcaccattatcttttcttcctttttccccaaagtaaatccctccggttaattctcttaaaaaaaccagatcagtaccttcaattctttctctttttaaaggagaattatcaattaaggatggaaaagtgaaggttggacgtacattcgcaaacaatcctaattttttacgcatgagcagtaaaccctgttccggacgtaccggtgcacttggatcattatcgtattttggatgaccgattgcgccaaataaaacagcatcggctttcatgcatatttcgtgagtttcatcaggataaggaactccaacggcgtcaattgcacatgctccggttaaggctggggtccacgttatttggtgattgaatttttttgcaatggcatcagatacttttaccgcttcgtttattacctcaggaccaattccgtctcctgctaaaagggctatgtttaatttcattctatgtttgttatttaaggttctaaggttctgagttgctaaggttctaagattttttctaatttaacgcatttagtaacttgacgttgttgttgttgttgttgttgttgttgttgttgttgttgttgttgttgttgttgttgtttctcaggttctgagttgcttggattctgtttttttctcagtttcttagaatcttagcaacttagcaccttttatcaggtaactatattaagcattttttgagtggctataatcgctgcaacagtctggtcagaatctaatcctcttgttttgaattcttttccgttgttgacccaggtgatgatagtttcgcacaaggcatcagagctgcttccgggagggattcttacggcatagtcaattaatttgggaagtgttagttttttgtttttataaatcttggataaagcattcataaaagcgtcaaactgaccgtcaccctgcgcattttcttcgataacttcatcgccgaattttaggcataaagtcgttgacgggcgcattcctttggagtgaactaatatataggattcaatttttattctttcttcataagtatggctgtctagaacatcagaaataatgtagggaagatcttctttggttacggtctcttttttgtctcccaattcgatgattctttgtgtgaccaatttcaaatcttcctgattcaattttaaacctaattcctgaagattcttttctatattggcttttcccgatgtttttcctaaagcatattttcgttttcttccaaagcgttccggaagcaaatcgttaaaatacagattgtttttattgtctccgtcggcatgaattccggcagtttgtgtgaaaacattatctccaacaatcggtttgttggcaggaattctgtagcctgtaaaagtttctaccagtttactcacggtgtacaaagaagtttccttaatgttgatgctcacttcaggcaggtaatcgtttattacggctacggtactttcgagtggtgcatttccggcacgttctcccattccgtttacggtcacatgaagtccgttgatgccggcttttatagcttccataacattggcaacgcttaagtcgtagtcgttatgagcgtggaaatcgaaatgaattttaggatatcgggctctgatttttgaaataaactcaaaagtcagtgacggaattaatacacctaaagtatccggaagtaaaattcgtttaacaggctgagtggatagaaaatccagaaattgaaaaacatagtcaggagaatttcgcattccgttgctccagtcttccagataaacattggtttcaatatcattttcctgggctaaactgatgatgtatgcgatttcagaaaagtgctgttcaggtgttttttttaattgatgggtgagatgatttagggagcctttggtcaataaattctgaactcttgcgccagcttttttcatccattctatcgaaacgccgccgtctacaaaagcaagaacttcaatgcgattgatgtattctttttcggttgcccaggtagtgatgctttttacggcctgaaattctccttcgcttacacgtgcagaggcaatttcgattcggtcaatatttaactcctccaacagtaattgtgcaatggttagtttttctgcagcagaaaatgatactcccgaggtttgttcaccatcacggagtgttgtatccattatttcaatttttcttttttccatattgattttccaaattcctttatacaaatagattgttgttgtgttgtctgggtttgtttaagttataagacccgacagatttaaaaaaaaactgccgggtctcataggactgaacctgattttttaataaggaagtttgtcagcaaaagccacaatgtcttctttaatgttttgtaaataatcaatatcgtcaaagccattaatcatgttgttctttttgtatccgttaatagcaaatgattcttgctggcctgtcgataataaagtaatcgtttgattgggtaaattaatttccagttctgttttaggatcagcttcgatggctttaaaaatggtttcggcaaattcagggcttacctgaaccggaagaactccaatatttaaacagtttcctttgaaaatgtcagcaaagaagcttgaaactacagctctgaaaccgtaatcgtaaaccgcccaggcagcatgttctcttgaagatcctgaaccgaagttttttcctccaacgagaatttttccactgtaagttgaatcgtttaaaacgaaatcagtttttggagtatcgtctccgttgtacctccagtctctaaacagattgtctccgaaaccttcacgtttagttgctttaagaaaacgagccggaataatttgatcggtgtctacgttttcaattggcagtggcactgcactgctggtaagtatgttaaatttatcgtatgccattttctggaattttagattttaggtttctggattttagattttttttgaaaacttaaaacttagaaactaaaaagttttgtattaaataatgtaagtcaattttatctgaagaggtttagatcagcaatctgaaatctaaaatcttcaatctaaaattaaaataactctcttgggtctgttagttttccggtaacagcggctgcagcagccataatcggacttgctaataacgttcttgaaccggggccctgacgaccttcaaaatttcggttggaggtacttaccgcatattttccggcaggaactttatcgtcgttcatcgctaaacaagcggagcagcccggctgacgtaatacaaaaccggcatccgtaagaatatctaagattccttcctctttaatttgagcttcaacaacatgagaaccgggaaccagccatgccgttacattgtcagctttttttcttcctttaacaatttcggcaaaagccctgaaatcttcaatacgcccattggtacagctccctaagaaaacatagtcaattggttttccaatcatgacatcgtcttctttaaagcccatgtaagccaaagattttttgtaagtttcctcaccgccttcaacttcttttgcatttgggatatgttttgagataccaattcccattccagggttagtaccataagtaatcattggttcaatatcggaagcattgatgttcaattcggcatcaaaaacagcatccggatccgtttttagggtcttccagtaggcaaccgctttgtcccatgcttctccttttggagtatataatcttccttcaaggaaatcaaaagtagtctgatccggagcgatcatcccgcctcgggcacccatttcaatacttaggttacaaaccgtcatacggccttccatggtcatattttcgaaaacatctccggcatattcaacaaaataaccggttccgcctgaagtagttaactgagcaataatataaagcgcaacatcttttggtccaactcctttgcttaactgaccgtttacgttgatacgcattttcttgggttttggctgcatgatacattgcgtagaaagaaccatctcaacctcagaagttccgataccaaaagcaatcgctccaaaagcaccatgtgtagacgtgtgtgaatcaccacaaacaatagtagcacctggcaaagtaattccgttttcaggacctactacgtgtacaattccatttttaatatgtcccagtccccagtgcgaaattccgtattcgttggcattgtcctcaagagctttcagctgattggctgatagagcatcttgtactggcaggtgttgattaatagttggagtattgtggtctgcagttgcaaaagtacgctccggatataaaacggaaacgcctctggcttttaatcctaaaaaagcaacgggacttgtaacttcgtgaataaaatggcggtcaataaaaaacacatctggtccatcttcaattttacgcactacatgtgaatcccatactttgtcaaataatgtcttactcattgttttgtttttttaattgtaatttctataaccacagcaatttctgcttctatatagtaggaaagcaaaattaaaaaaagctaaaaagtggtcaatttcaatatttcattatatacgatacccaaactaaaaatacgaattgcgattggcttttgaaaaatctgtttttggtcgaaaaaagaatcgcagataagtattgtttttctttccgaagttaatttccggagagtggcttcgaattttagcagttgacgaatttgccttgaaatcgctataaaatatagactttaggtctgaaaaatgtaacaaaatcaataaaaaagacagtttttgttgattttgaattcctttttaagtttctggaatctcagataaaaacactttttaagcgtactttgacgccttgaagaggaatatgtatttgtgtttttttaatggaaataatacgacatccaagaaccgtatttttttcttttttagaatgaaattaaatgaagaagtagaagattgctcgtggagaaattaacggataatgacgggtatctgacatttgcttttaaaagctagtgctaattttgaacattctaattttaaaaataatgttatgaatttaaatgaatttgcgtacaaactgggagttttaggaactgtaattattttgctttgggtgggactttttaagtttacagcagtggaagccggagcgataaaagaattggtcgaaaatcattttgctatgggctggatgtacaaagtaatgtcagttcagcaggtttcaaatcttattgggatttttgaagtgctaacggggattggtttgctggcttctttgtttttaagaagaattggtttttatgcgggctttgcatcagcggttatatttgtgacaacattgagttttctggtgaccactccgggtgtttttaaaatggttgaaggatttcctgtaaccgatttttttattttaaaagacattccgtatttggcaatttcactgatggtttttgtgaatgggaaagaataaaaagagtaattgatatggataacctctgttgtttaggatgcctttctgataaagaaaaaagaaagaggaaatctcattgttttgagacttcctcttttattttttaattcatgaagtttatagtttgtgataagtaaggttggaatctatggctccaagtctcactttgtaaagagagtaattctgatacaggtccggccttgcaattgcaaaataaattacatttccttttttgacaaaatcagaatgatttgttccttcggatgaaatagattttgttacgtttcctaggttgtcatatttttctatttttcgggcactggaaacaataaaaccattatcaacttctataagtccctgtatgtttccgctgccattaaatctaattaatttaagctcttcaccttgaggtgatgtaattctcagttcattgtggctgtatagagctaaatttccatttgtaagatttattactttatagaaaccatttaggttattccattcttttaaggaagtatttaagctgcctgtctcgtatattttttgattggttatctcgagattttcattaagaaatagtattaaaggcttgtaattcataaacgcatctgtcgttgatggggcatatttacctccaaaagcaacgtaggtatttcctgttttaattaaatgcccgataaatgcatttttaagggtgttttcgtaagtttttcgacttataatctgacctgcattatttctaatttcgatggaaggattttcggcataagatccataaaaataatattggttattattttgaattgagccataagtgatttgacctgagttgccgaatttaatgaattcccaattagagtttaattctacttctcgacctcctatataattaagagactcaaccatcgtcacaattttatttccgttgtttagaaaagtagtgtgggaatgtcctgaattagccatcttttgagcaaccatttttgtagtaaaagttttagttgtttcatcgtatgctacatgtcggtacaattggggagatgatgttaatattgttctgtaaccttcagtatagaatattttattctcgtaaacacctatttctataggaaatacatcagtgtcgttgttggttgtaattggattttgagttggaaaagaataaagattattcactgtaactccaattgtattggtggtacttagtccattcgcatctttaacaactaatgaaacactatattgtccgggtttagaataataaaatgtaggttctttttcggtagaggtaatgtcgtttccaaaattaaaagtataggatacgatttctgcacctgctgtggcggtattggttactttaatttcatccccaatattaactattgttgctgatagagtaaaggaagcaatcggtttgactgtttcggaattgtcgctgctgcaggaattaagaagatttaaaaggataaatgaaagaagtaaaatttttttcataaaatttaatgcgttttttattaggttttaaagcccaaaggtatctttttttataagaaaaggagtcgtttttttctaagaatgatattcatgattctttattttttcaagcaaaaaaaaaacgtaaatttgaacttccatcatttttattttttgaatttttatcgatcactaaatcagtaatttaggatcggataatcttcgaaatttggacacaagcgaaagcgaactggcggagcaattttaaatttgtctttttatacctatgtacttaatattcgataccgaaaccaccggattaccaaaacgatgggatgctccgataactgattctgataactggcctcgctgtattcagatcgcatggcagctccatgacgagatgggacagctcatagaacaccaggattatctggttaagcccgatggatttaatattccgtacgatgccgaacgtattcacggaatttcgacagaattggctgatgccgatggaatcacgctggccgaggttttggagaaattcaacattgctttaagtaaaaccaagtttattgtcggtcagaacttaggttttgacgttaatattatgggggctgaatttcatagaatgggagtcgattctcctatgagttcgatgcccgttttggatacttgtacagaagttaccgcttcattattaaaacttccgggtggacgtggaggaagattcaaattgccaacgttaacagaattacacgaatatctttttaataaacctttcgcagaagcgcacaacgcaactgccgacgttgaggcaactacgcgttgtttcctggagttaatcagaagagaagtttttaccaaagaagagctggatgttcctaaggattatttcaaggaattccaaagtagaaatccacaagagtttccgttaattggtttaaaacacattaaccttaaaaaagcgtctgataaaatcagagagcaattaaaggctttagagtctgttggacaagaacctgccgtttcgcattctgacagagaagattttaaagccgcaaaatatgcgcacttacacaatcatacacagttttcggtactgcaatctactataggggttggaaatatcgttgccgctaccgccaaaaacggaatgccggctgttgccatgaccgataccggaaacatgatgggggcttttcactttgtgagtgccgttatgaatcataataaaggagcgtctgccaaaaataaagctttggtcgaagcaggtgaggagccaacggaaacagagataaagccaattgtaggttgcgaatttaatgtttgtgacaatcacctggacaaaagcaaaaaagacaatggaaaccagattgtattattagccaaaaacaaaaatggttatcacaatctggctaaaatgtcctcgatcgcttttacaaacggattttattatgttccgaggattgaccgcggtattattgaaaaatacaaagaagacattatggtcttgtccggaaatttatacggagagattccaagtaaaattctgaacattggtgaaactcaggctgaagaagctttgatctggtggaaagaacaatttggagacgatttttatctggaagtgatgcgtcacaatcaggaagatgaaaaccgtgtgaataaaacgctgattgaattttctaagaaacatgatgttaaattaattgcgaccaataatacctactatttaaataaagaagacgccaatgcacacgacattttgctgtgtgtaaaagacggtgaaaaacaagccacaccaattggtcgcggccgtggatatcgttacggattacccaatcaggaatactactataagtcaggtgaggagatgaaaaaactcttcgcggatttacccgatgccattattaacattcaggaaattgtagacaaggtcgaaggatattcactttatcgcgatgtattgcttcctaaatttgatattcccgaagagtttgttgttgccgaagatgaggctgatggcggggttagaggagaaaataaatatttgcgtcatcttaccatggtgggagcaaaaaaacgatacggcgaaatcacagagtcgattcaggagcgtttggattttgagctattgaccatttcgaactccggatatccgggttactttttgatcgttcaggattttatcgccgaagccagaaatatggacgtttcggtaggtcccggtcgtggatctgctgccggttctgcggtagcgtattgcttaggaattaccaatatcgacccgattaagtacgatttactttttgagcgttttcttaatcctgaccgtgtatcgatgcccgatattgatattgactttgatgatgagggtcgtggacgtgttatggagtacgtaattaataagtacggtcagaatcaggtggcgcaaattattacgtacggtaaaatggcaaccaaatctgcgatacgtgataccgctcgtgtactggatttaccattgtttgaagccgatagaattgcaaagctgattccggctatgatgccttcaaagtggaatttggcgcgttttatttctgaaagtgaggatgaggttaaaaaagcacttcgttcagacgaatatgataatgtaaaggaattgatcgccattgccaatgaagaagatttggcaggtgaaaccattcaacaggcaaagattctggaaggatcgatgcgtaataccggaattcatgcctgtggggtaatcattacgccatcggatattacgaatttcgttcctgttaccaccgcaaaagattctgatttgtacgtgacccagtttgataactcggtagcagaaagtgcaggattactaaagatggacttcctgggtctgaagacccttacccttataaaagataccgttaaactggtaaaatacagaaacggaattgatctggatccggacacatttccaattgatgatgtcgagacttatgcacttttccaaagaggtgaaacggttggaatcttccaatacgagtcacccggaatgcagaaatacatgaaagatctgaaacctacggtttttggagatttaattgcgatgaacgccctgtatcgtccgggacctctggagtacattccatctttcgttcgaagaaaaaacggggaagaggaaattaaatacgacttagatgcctgtgaagaatatttgggagaaacctacggaattacagtttaccaggagcaggtaatgcttttgtcacaatcgttggctgattttacaaaaggtgaagccgacgttttgcgtaaggcgatgggtaagaaacaaaaggacgtactggacaaaatgaagcctaaatttgtggaacaggccgcgaaaaaagggcatgatgcaaaagttctggagaaaatctggaaagactgggaagcctttgcgagttatgccttcaacaagtcgcactcgacctgttatgcctggattgcttatcaaacagcctacttaaaagcacattatcccgcagaatatatggcagcggttctttcgaataatatgaacgatatcaaacaagtatcgttttttatggaagaatgtaaacgaatgggcttgcaggttttaggacccgatgtaaacgaatcctattataaatttaccgtaaacgatgagtatgcagttcgttttggaatgggagcgattaaaggagtgggttcaggagccgtagcaactatcgtagaaaacagaaaagacggaagatataaatcgatttttgatttagcgaaacgtattgatttgcgtgccgccaataaaaaagcaatcgaaaacctggcgctggcaggtggttttgattcctttgaaggaacaaccagagcacagtattttcatgatgatggtgacggaattacattttatgaaaaagcgatgcgttacggatcgaagtttcaggaaaacgaaaactcctcacaggtgagtttgtttggagaagcaagtgaagtgcagattgcagagcctgttgtgcctccttgtgaagactggagtaccatggagaaactggcgaaggaaaaagaagtagttgggatttatatttcaggacatcctttggacgatttcagatttgagatgaaatacttctgcaataacaaattggaatccttgaaaagtatgaacgagttcgtgggtaaaaatctgaattttgcgggaatcataaacaatgttcagcatcgtgtggcaaaaaatggaaaaggctgggcagtttttaacttagaggggtatgacgaaagttacgagttcaagatttttggggaagagtatttaaaattccgtcattttctaattcagaataattttgctttcatcaaaatactaataaaagacggttgggtaaatcatgataccggtaagaaatcggatccaagaatgcaatttgttgaaataagacaattgcaggacattttggaagcttttgccaaaaagctcattttactgttaaacataaaagaccttcagacagattttattcataggttaagccatttgtttagcgagaataaaggagacaattcagtgacttttgagatcatggaattagaaaaagtaaagagattggttgaggtcgaaacgccaaaagattttgaggaaactacttttgaagaagagaatgacagggaagatgatggaatggaagaaacaaagattcaggaagtaaatgaagttgaggaaattaaggttgtaaacaaattaaccatgccaagccgcaggttaaaaataaaaatctcaacagagctattgatagaattggaaaaaatgcaggtgaattttaagttaaattagattttaacagttaaaatttaaaagaatgcattttttttaagttaaaattatgcatgcataatagttttttagtaatattgctcaaaattacaacgatttcgttccaagtctaacaatacaaaccagaagattatgttaaaataatctatgtttgtaaaaattaattaaatcaaaattatgaaaaagaacctatttttattagggttattagtttgctctatggccacaatggcgcaaacagaaaaagcagataaaccggaaagctggtattttaaattgggtgcatcttatttcaaccaaactgcttctacagaatttcctgttgttggaggtcaattgccaaacagagatgtttatgcaggtactttagcaaataataaattagcatctagagaaagtgttactgggtcttttggacaaggtttcagaagtggaattactgctggttatagattttcagcacgtttaggagttgagatgtcagctaactattatgtaagtaatgaaaaaaccatgtcacaaacgactaacagacttatttcatataatccagctactagtccggcagctacttatgtaagttttacagcgaatggagaaattaaagcttttgatttagcaccagcaattgtgatgtttttaggagaagctcatggttttgaaccatacactaaagtaggagttattgttcctgttcatggtacattggatattaaaacggatagacagtatacgacgtttgtaggagctaatcaagttgcttcaacaaatgctttctcaaaagatgtagttaagccaaatccaacaatcggatttatggcatctttaggtacctcttataaattagggaaacatatttctgctttcgcagaattggaataccgtaactttacagtacacggaaagactaaagaaactacaatatatactgaaaatggtgtagataaattaaatgaaacaactgctttcagagctgcttcatattctgcaactcatactaaatatgtagatcgtttagacggaaactctaataataaggagtataatccatcagggtacgattctactaaaccaatgaacgaattaagttcttatgttggaatttcaggtttaggactgactttaggtcttaaatacagcttataattttatatagttttagtttttagaaaaagaggatattcattgcgaatatcctctttttttgtcccctgtcatttcgatttttatcatagaaattgaaatgacaatattgaggtcaagactaatgatcgcagaaaaaaatctgccaaatctgccaaatctgcgtgaaacaaaatgggctcgctctttatctagagtttctaaattctttcaacacttcatcgataacccaggttgttctggcagcagaggttccttttgatggtgagaaaccgtctttgcctaaaatttcagcaacaacagtttcaacaagtggcaattgaatgtgaagcggattttcgatcgtaatactttctttttcaccatttgcatactgaatatgaattgggtcattaccgaaggtagagaacgaaatctttcctttgtcgcctacaatatcagtattgtcgtaacgttcaaaactggcaaaattccataagccggttccgtggattccattttcgaataaaaatgacatcgaaaccgaatcttctgccggataggctttgagctgtgaactcgcatgcccgcgaactgatttaatcggaccaaatacaaaatcaagaaaatctaaggtatgacaagccaaatcgacaaatattccgccaccggaaatgtgtggtaaaaccgtccagggtaaattgatttcgtcgtcgtagcgcttctcaaacggatggtataaaatacaatttacatgtctgacagttcctattttaccttgttctataagttcttttattttcaggaatcttggaaggcttcttctgtaataagcaacaaataaaggcacattgtgttctttacaaacgctgatcatttcgttgcattcttcaaaatttaaagccattggtttctctacgtagacaggtttcccggccttggcacataaaatagtatattctttatgggaagatggaggtgtagcaatataaacggcatcaacttcaggatcattaattaaatcgatggcgttggagtaccatttcggaacattatgacgtttggcatagtcttcggcaagagctgcgtctctgcgcataacagcaactaaagctgaatttgaagctttctgaaaagcaggaccgcttttaacttccgttacatttccgcaacctataattccccattttacaattttcatgttttagattttagtttttcaaatttagaaagtttgccctgaattacactaattattactaattctttgtggtaagaatagttgttatgaattatttttcacgcagatttaaaaggatttgagcagacactcacagatttttttaaattcaattggtttggatctgcctaaatctgcaatatctgcgtgaaataaaaataaagccacgaattcacgaattattttttcaagctatttttgaaaatattggagcggatactcatttttttaaattcaattggtttggatctgcctaaatctgcaatatctgcgtaaaaaaaaagccacgaactcacaaaataattcgtgaattcgtggctaaaaaatttagcttagagtattacttttttggtaaagctttaaagcccatattgtaaagtgtaaacgcttgaacatctacattctcctgaatggttgcggcaacagattttcctgcaccgtgacctgcttttacatcgatacgaattaataccggattttcacctgtttgtttctcttgcagctcagcagcaaatttaaaactgtgtgcaggaaccacacggtcatcgtgatcacctgtagttaccatagttgcagggtacttaacgtctttttttacgttttgtactggtgagtaaccttttaggtattcaaacatttctttgttatcctgtgctgttccgtaatcgtaagcccaacctgcaccggcagtaaaagtatggtaacgtaacatgtccattacaccaacagctggtaaagcaactttcattaaatcaggacgctgtgtcatggtcgctcccactaataaacctccgttagaacctccgcgaatagcaaggaagtctgaagaagtatatttttgtgcaattaaatattcgccagccgcaataaaatcgtcaaatacattttgtttttgcaatttagttccggcatcatgccattttttaccgtattcaccaccacctcttaaattggcaacagcataaacgcctccgttttctaaccaaacggcatttgcaatactgaaacttggagttaagctaacgttgaatccaccgtatccataaagaatggttgggtttttaccgtctaattttaatccttttttataagtgatgatcatcggaatttttgttccgtcttttgaagtatagaacacttgttttgattcgtaatcctcgcttttaaaatcaacttttggtttttgatagatttcagatttacctgattttggttcaaatgaatagatcgttccgggagtagtgtaattggtaaagctgtagtataatgttttatcctcctttttggctccaaatccaccggcactacctactgcaggaagtttgatttcacggattaattttccactgtaatcgtattgttgtacaaatgaaaccgcgtctttggtataattagcaaagaagaatcctccaccagtcgaaggagataaaatgtccttagtttctttaatgaaatctttccagttttcaggtttcggattgctgatatcaacggttacaacacgagtgtttggtgcatttaggtcagtttcaataaataatttagttccttcattctcgataatctgattgctgctgttgaaattgtctacaatcgttacaataggactattaggtttcgttaaatctttgataaacaactcatttccgtaagtagaattggctgcagaaattaccagatatttgtcgtcttctgtaacatatccgccaatatatctgcgtttttgatcggctccgtaaatcactttgtcttctttttgagaagttcccagtttgtggaaatacaatttatgctgatcagtttttgctgataattcgcttccttttggtttgtcgtaactagagtaataaaaaccgttgttgccatgccatgaaactccgctgaattttacgtcaaccaaagtgtcttccagaacttttttcgtaatagcatcaataatgattacttttctccagtcgcttcctccttcagaaatagcataagccgcttttgatccatctttcgagaagtttaatcctccaagagaagtggtaccgtctttagaaaaagtgttcggatctaagaaaacttcttctttaccgtcttttccttttctataaactacagattgattctgaagtccgttgtttttagaatagtaagtaaattttccttctacaaatggagcactaattttttcatagttccataatttttccatacgctttttaagttcatcgcggaatggaattttatctaaataaccataagttacttcattttgagcctttacccaagctcctgtttcggccgatttatcgtcttcaagccaacgatacgggtcgtttactttagtgtcaaaatacacatcaaccgtttcgccttttttagtttggggatactgaattttgccttgcccgaacgaaattcctgcagttgtgattgccattagaagaaatgtttttttcataatttgtgtttaacagttatagcaaaaataaagttttttgtgagatgagtaagtatttaaccgcaaagcacacaaagattttttctaattggagtcattagaaaacgcaaagttcacaaagctttgcgaactttgcgttttgataaactttgctatgtataaaaagctttgcgcactttgcggttaaactaaaaattataagttgaagttaactccaagaacaatatttcgtcctatgtttggtataccgtccgtttttaatcttgacaggtgagcaatatattttttatccaataaattgtttccgtttaagttaacatcaaaagcatgtttgcctagttttactgttccaccaaagcctaaattcactaaagtatatccttttgaagcagtttcaaaaccgcttacattattttggctaaaagtagaagaaacatttagagaagcatagccttcctcaaaccaatttttgattttgaactcagttcgtaaagtattattccagttattagcaggaattaaaggcaggtaatcattgttttgttttttaccggttaccgtttcaaaactggtttcaaaatgcagccagtccagcggatgagggtgaaagtgtaaacctgcttcacctccgtataatttggcgtcattctgaatataagcaaaaacatcgttgttatcacgtacttcgcctgttggtgaagtgtaaatgtagttgttcacatgattgtaaaatccgttgatgaaaaactcaaaatgggtgtttttatattctaagtttaaatcggtttgaacgttttgctcgttttttaaagtagcatttccaacttcataacggttcgttccttcgtgaaccccgtttgaagtaagctcggctaagtttggcgctctgaaacctgttgctacattcagtctcagtgttaaaggttctgcaagtttggttttatatcccaaagaagcattaaaactgtcaaaggaacggtctaaaggcagaaaataaccttcttcaccttcggtaccgtgggcttcagaagttacttttcgattgtcaaaacgtaatccggcttgtaaaacattattgttccattcgtaatttgcagttccaaaagcaccaaagtcatttgtggttgcatccggaattaaatattcttccccggaatttttattagtctgatgcattccctgaaccccaacaatcgtttcaattttaccgaattttggaaaatgatatttggcattgtaattaaaagtattcagtttcatatgaagtgcagcaacattactgtcttcaaattcacttctgtcattcgcaatgtaacctaaatcaacatccagtttagagttttgaaaaaagatcacattgtttaaactcaataaatggctgaagattccttgtcttgggaacatcgtatttttgcttgatgactgctctgcgattccttcttcgggaataccaatgtcgagcttgttgtaattgtaacgtaaaacacttgagaaactagagttgctatatccaactccggttttaaaatcggtttcattataacgggtattagttacacgatcaccgtcggcaattttgtaatcagaatgagtgttaaagcttcctctggctaagaatttccagttgtctgttgaagtttttaagccaatagaagaattacttccctgtgtattggtgaaatatttttgactaaaattagctttgaaggtattcgcatcggcaaatttttcaggattaaaatacaaaacaccgcctaaagcatcagatccgtataataaagaagctggccctttgattacttcgacactttctattccggcatcgttaagtcccagaccatgttcgtctccaaattgttgattttcgatacgaactccttgtgagtatactaaaacacgatttccgcttaaacctctaataaccggttttccaatagaagttccggtagaaatttgagaaacccccggaatagttgccagaccttcgattaaagttgaagttcctttttgctgtaaggttttaatgctttcatgttctactttcattacgttttgcgattgcaatttgttgaaaggagttgaaaccactacttcatccatttcaaaaacagattccgtaagtgtaatgtctaaagtgttttcttttaatagtttagaaatggtcttgctttgcgtagtgtaacctataatagtgaaggaaattcggaaacttccgtttggaagattcttaaattcgtattttccgttttcatctgttgttgttcctttgtgtagttcagctgcataaacagatacgccggctaagggtttgttttgaaggtcgataacagttcccgataccgaattttgagcagaaagaatgcccgtaaaccctaaaataagggccaatattagttttttcatttgaaaatgatgctatagttaattgaatttgtcttccaatctgaaactaaaatcaacgatgcaacctgccgaacctgaaagtttcaggatggggaaattcaccaattttttagaattagattaaaaagagtttaaatgtatttcgtgtgtttcgaaatttaggcaactatagcttgcggaggcccccttagtaaataggcactctctgaaaacgaaaataatctttctgaaagagtaaagaagtagggaatttcgttatcgaaatcgtgaaactgaagcgcaatttcttccggaacaatataactgccaaaagcaaaatgacaaacataacataagtcataattatggtgctggtgcgttatttcgccacttggatcattgtaatcgtggtggcattgtttttctgaaagttgctttacaatatgctcataactgtgtatggactgaaagaatattgagaacaatatcatcagaaccaaagaaacacttaatatgagttgttttcttttcattacacacaaaggtataaaagatagaaggaaaatagatttattttttagattctgttaacgattcattgaaaaaagtttagaaaaggcattttttttggatcgaaaagcgaataattacattcaaattgcttcctgaactggcattatattatatttgtaaaccgttgggtgtaattaacaaaaaaaatgacttgacacatagaaatatagattttaggtgtaaataaagaggattaaaaaagaaatatatttctttcacagagaaagatatgtgtgtttagatgaagtgaaacgtcttttttaggaaaacagaatctatgtcactatgtgttgaaatgaattatactaaattaggtatttgtaattgaaataaaactaccctaaaaaacgtttacttgaaaaactctttaaaaccaaaatacgatatgcgactactatttagctgtttgtttttagtatcgttttttaattcttttgctcaggaagtaaagccggaggttaaaccagaagtgaaacctgttgttaaaatagattcattgtatcgggaagatcagttttatttctccgttacctataatcttctgactcagattccacaaggacttaaacagaataaattctctgtcgggctttctaccggttttctgcgtgatatgccaatcaataaaagcagaacggttgccattgcagcgggtttgggtttgagttatcaaaattataatcagaacctgactattgctaaaggagcagatggtgagttgatttatgacgtaaccgattataatgatatcaaatcaaaccgatacaagcagtatatggttgatcttccgatagaatttcgttggagaaattcgacctacgaaagttatagattctggaggatttacggaggattcaaactgagctatgttttttctaataagtctcttttagacaccggagaagagtctcataaaatttcgaacaatcctgatataaacaggcttcagtacagcgtatatttggctgttggttataacacctggaatctttacctcaattatggattaaaccctttgtttaaaaatgtaacaacggtttcaggacaaaatattaatgtaagaacgctgaatgcgggattgattttctacattttatagccataaatacagaaacaataactgcggtaaaattccaataaaagttccaatcactaactcattaggagaatgggcttccatttctaagcgtgatgaagcgacaattcccgtcattaaaatcaggaaagcactccagtaaggattttgcaattgaagatgtgtgttcagtccaattacaaaaatggtgaatccgctaagggccatcatgtgtaagcttgcttttattttgaacagcgagcaaatcagagccagaatggtactgaacaaagcgcccagaaaaaagaaatgcaattcaggataacggctaatgacgatgcttcgttttaccagtaaaatatacaaaaagcactgtaaaatcagagggattttgcgttgtgaagtttcgtgtatcataatagaattcacacgccccgtcgaacgtagtaaaagataaaacagtatgggtactaaaatggtgatgatcagaatttgaagcagcacataatatttttcctgagtactaaagagatcgtgtttgaagaaaagataaaacaaggtggcatacatcgatataaaaatcggatgaaagatataggagaatataggcaggattcttttcaaaacgttgtatttagtggtgttaagcaaatataaacaaataatgtttttttgctacgaatcgtgtgaattagcaggagttaaaattcgtgcaattcgcgacaaactttttagtaatctgtggcaaaaagtgccacaaagaattagtgaaaatttgtgaaattcatggtaaacctttttttaaatttgacaaaaagaaaatcttaatgagcataaatgtaaaaagccttatcccggttctcaatgccgaatggacaggttcagattctgatgtttttgttgaccatatttcgatcgacagccgttctctgcaaaacggttccaaaactttgtttattgccctgtcggggattaataatgatgctcatttgtatattacagaattgatagaaaaaggggttcagaattttgtagtacagcatattcctgaagatgtaaaaggaaaggctcattttttagtggtcgaaaatacactacaggctttacaggaatttgcaggttattacagagatttatttcatttccctattatcggattgactggaagtaatggcaaaacgatagtaaaggaatggcttaatttcttgttgagtccggactttaatattatccgaagtcctaaaagttacaactctcaggtaggcgttccgttgtctgtaattgctattaatgaaaaacataatctgggaattttcgaagccggaatatctacggttaatgaaatggtgaaactcgaaagaatcattaaacctaatattggagttttaaccagtattggttcggcacatgatgaaggatttaaaaatctggaagagaaaatagacgaaaagttactgctttttaaaaactcgaccgttattatttatcagaacaacaagcttgtagacgaaggtcttgcgaagttaagtctggactatcttttaccggaacgaatacttttttcatggagtttcactgatgagtcggcagatgtttttgttgtgaaacgtgttaatgaggacgaaacgaccagtattcaggcccgttataaaaatgaaatttttgatctagaaattccattcagtgattccgcttccatagaaaatgcgatttcctgtctcttggttttgctttatatgaagtacgatgccgaaaccattcaaaatcgatttcagaatttataccccgtgcaaatgcgtttggaggttaaaaacggaatcaacaattgcagtattgtcgatgacagttacagctcggactttcagtcactcaagatagcattggattttttagagagtcagcagaaaaagaacgcgtcaaaaacagttattctgtcggatattttccaaagcggattttcaaatgaagaattgtacaccaaagtagcacagttgattgcggataataaaataaaccgtgtcattggaataggagaaactatttcttcctttgccgctaaattctcaaactgtattacttttcccaatacagctgaatttattacgcaaatggagagtctgaatttcgaaaatgaagccattttaattaaaggagcgagatcgtttcagtttgaagaaattgtgtcattactcgaagaaaaaacgcatgaaacgattctggagatcaatctgaattcgattagccacaatctgaattactataaatcgaaattagcggctaacgttaagctaatggtgatggtgaaagcatttggttatggaaacggcggacttgaaattgcgaaactgctcgaacatcacaaagtagattatttgggtgtggcttttgccgatgaaggaatctctctaaaaaatggtggaataaaactaccaattatggtgctgaatccggaatcgaccagttttccttcgattatacaataccatttagagccagagatatatagtgtcaaaggattaaaagcatttttgaaaattgcaagagaaaagaacctcaaagattttccgattcacataaagctggataccggaatgcatcgtttgggttttgaagaaaatacactggaggaattgattgaaactctcagaggaaattcgaccgtaaaagtaaaaagcgtgctgtcgcatttggcaacaagtgacgaagtgaagcattttgattttgtgagatcccagattcacctgtttgaaaatttgtctttaaaattgattacggctttggatattaatccgattcgtcatatactgaatacttccggaataagtaattttcccgacgcgcaatacaatatggtacgtttaggaattggtttgtatggggtctcgaacgatcctgctgagcaaaaatatctggaaaatgtaggtactctgaaatcaattatctctcaggtacgaacaattccgggaggagacagcgttggttacggacgtcgttttatggcagataaacaaaccagagttgccaccatacccattggatatgcagatggaatttcgcgcttgtggggaaataaagtagggtatgtggtgattaaggatcaaaaagcgttcattttaggaagtgtttgtatggacatgctcatggtcgatgtcaccgatatcgattgtaaagaaggtgactcggtaattgtttttggagaaagtccaacggttattgaaatggcaactgctttaaaaacaataccgtatgaaattatgaccagcatatcacaacgggtgaaaagagtgttttttagataattttaacaaattgtcaataaaattacgtattttcgaaaatcaattaagtataaactaaaataatcgattatgggattttttgcagattttaaagcttctttgctgaaaggtgatgtgttgagtttagcaacagcagttgttattggtggcgcatttggaaaaatagtgggttctgctgtagacgatattattatgccagttgttggtttacttacggggggaattgattttactcaaaaatttgttacgctcgatggtaatagttatcccaatttagctgctgctaaagctgccggagccgcagtaattacctatggaaatttggttcaggcaatcattaacttcgtaattatatcattttttgtatttgtggtattaagagctgctgaaaaggctaagaaaaaagaaacagtagttgaggcggcacctgccggtccaactcaagaagaactacttacgcaaattagagatttgcttaaaaaataattccgctacactaagtctaactaaaccgttccttaattggggcggttttttttactatttgtttgttttgtaacattttgttattttttgtgaagcacgttgttttgacttttattatgtatacttttgcataacaaaataaattaattcatactaaacatataaaaatgagaatagcagtcgtaggtgccactggtatggttggcgaagtaatgcttaaagttttagcagaaagaaattttcctgttacagagttaattccggtagcttctgagaaatcagtaggaaaagaaattgaatataaaggaacaaaatacaaagtggtaggactgcagaccgcagtggatatgaaagctgatattgctgttttttcggcaggtggtgaaacttcgctggaatgggctccaaaatttgctgcagccggtacaacggttattgacaattcatcagcatggagaatggacccgactaaaaaattagtggttcctgaaatcaacgcttcgactttaaccaaagaagataaaattatcgcaaacccaaactgttcaaccatccaaatggtgttgactttggctccattgcacagaaaatacaatattaagagaattatagtttctacctatcaatcgatcaccggaacgggtgtgaaagcggtaagacagttagaaaatgagtacgccggagttcagggcgaattggcttataaatatccaattcacagaaatgctattccacattgcgacagttttgaggaaaacggatacactaaagaagaaatgaaactagttcgtgaaactcaaaaaattcttggcgataatacgatcagagtaaccgctactgcagttcgtgtgcctgttgtgggcggacacagtgaggccgtaaacgttgagtttacgaatgattttgatgtaaatgaagtacgtgaaattttacaccatacagatggagtagtagttcaggataacttagatacttttacgtacccaatgccattgtttgcagaaggtaaaaatgatgtttttgtaggtagaattcgtcgtgacgaaagccagccaaacactttaaacctatggattgttgctgataaccttagaaaaggagctgcaacaaatacgattcaaatcgctgagtatttaatcgcggcaggtttggtataaacagagattaaataaaattgttataaagagaaagccgtaattgcagcaatgcagttgcggtttttttgatgcataaacttaaaaattataaattagctgttgtaaaaatcaatgatatgaatttcgataactataaaataatagccaattacaatacctgtaaaacagacttgtttgtagcggatgaagaagagattctggcttgtgagaaaacgctaaatattctttttgatgaagattacaaagcgtatgtttcagaattcggaagcggaatacttggagggacctacgtacggatttatcttcccgaaacaataatgctgacacttgacgagtggagaaagcgtataacagaatattggttctgggatgaaggaaaggacgtgcttacgaaagaagaagttttgaattccgtaagaataggagacacgtacgatggcgatgagattattcttttaaaaaacgagtactttgtactgccaagacatagtgaaatgatctataaagcaggaactacacttgaagaaacaatcacctggttgtgttcgtcgggaattctgacggaagcattttctgaaagaaattttgaaccatttaatccgggagaaattacggaataattaaaaaaaaagcttttataattatggaattacctaggtttaaatatagtcctaatgcatacgaaatagatgtttttactgaagaagaaggaatttgttcaatttgtagtgtaaaaagaaacttaaaatatacaggttctttttacagcattgaagaaccagaatatatttgtccatggtgtattcatgatgggagtgtatcaaaaaagtataatggagagtttaatgattatagcggtattgaaaagatatctccagatccttcaattcaaagtaaaatcaatatttctgagaagcacttattggaggtatgcgaaagaacccccagctacgtaagctggcaacaagaagtatggctaacgcattgtaatgagccgtgtgcttttattggttatgcaaacaataaaattatcgaaccgtttttagatgagcttaaagaagatattgaggtaaatattggttacgatccagagcttattcgtaagtacttaacaactgacggaagcctggtcggttacttatttcaatgtgtaaactgtggacagcatagactacatgcagactctgattaagtaagtctgtagattagtttgtgtaacagctataaaaaaagcgagaattttacttctcgcttttttgtatttaatattccggggccagttctaattccaggccttctaattcttcagtaatagggatctgacaacctaaacggctattagatttaacataaaacgcttccgaaagcatagcttcttcttcatctcccatttccggtaatgcaacatcatttagaacgtaacactggcaagaggcacacattgccattcctccgcaagttccttcaacaggaagttcgtatgctttgcataactccattatgttcattgccatatcagtcggagcttgtaattcgtgtataactccttctcgatctttaatctttattaatacatccattttaattagtggaattttacgggttcggatcttataacgtgaaaaaatccttaaattatattaactgtttttgatactaaatgcgtattcttttttgttaccttctttaaggtgcatttttaccccaagagtatttccgtttttctctaatatcgttactatggcaattacagaataataatctttatcagattgaaaaaccaaagttccttcataggttgaattcattactccctgtttgtctgtggtaacagatacttttctcgggtgagagaattgtgcaacactataagttgctttgttggcaaactttgcttttccgccacaaatgtcgaacagaaaatcatagtttccaattctcaggcttccttcttcttcgttggcattagtcgaaaatacaatctgacctgtgtatttaaaatccgaccattcttcagaatcatttagccaagctttgtcaacaactaacgtttgagtggtttgttgcgcataatttacagaaacacaaaataataataaaaacagagcgtaaaacttcttcataaaatttaagatttaagggttatgtgacaaatttaattaaataagtgacaattccttaactaaaactcttaaatatttgtattatattttgctaaaaacgcaacaacccgtttatttagcactgtttttttgcgaaattataaattaaacgatataaggcgctattattcttgttaaatcgacgaaatcgaattgctgagaaaaatcgcgtttttattacattatattaaccaccgtttctatttgtggggcatatttttttatagtggtctcaactcctgcttttagcgtcatttgatttacactgcagctgatacatgctccttcaagacgaactttaacgtgtttgtcatcttctatagaaataagcgtaatgtctcctccatcagaatttaaaaaaggtctgatttcgtcaagagctaataatacgttgcttgttaattcttctgttgtcataattttatcaattagaaaattggtcaattagaaaattagacaattgatctaattatctaattgtctaattatctcattatctcattatattaattttttttaaccgctgaacatcccgccatagttgtaatttttatggcttcagtcgcaggtaaactatcgtttcggtttacagtttcctgtacaacattacgtgtaattccttcaaaaacggtttcgattaccgaagcagtttgtaaagcagccggacgaccgtaatcaccagcttcacgaatagattgtacaattggaacttctcctaaaaaaggaacgtttaagtcttcggcaagattttttgctccttcttgtccaaagatataatatttattgtcaggtaattcttcgggtgtaaaataagccatattttctatgattcccaaaacaggtacattgatgttgtcctgcatgaacatcgctactccttttttagcatcggctaaagccacagcctgaggagtacttactactacagctcctgtaattggtagcgattgcataatcgaaagatgaatatctcccgttcccggaggtaaatcgatcaacataaaatctaattctccccaatcggcatcaaaaatcatttgattcagtgcttttgcagccattggacctctccagatcacggcctgacttggcgctgtaaagaaaccgatagaaagtattttgatttcatagctttcaataggtttcatttttgattttccgtcaacagtaatcgaaaccggtttttcgttttcaacgtcaaacataattggcatcgacggtccgtagatatcggcatcaagaactccaactgaaaagcccattttggcaagtgttacagcaagatttgcggtaacagttgattttccaactcctcccttaccggaagcaactgcaataatatttttgattccagggatagcacgacctttaatttcgtttttctccggagtttctactttaatatttactttgattttagcttcaggggataccaattcatggattgtttttttgatatcatcttctgctctttttttgatgtgcattgccggtgtatgcaacaccaggtctaccacaacttcatcaccaaaagtaatgacattggcaacggcgccgctttcaaccatattttttccttctcccgctatagtaattgtttctagagctttaagaatttcttttctgtctaatttcattttaatggactattttcgattgatcgaaattgatttaaagtattgtatttatttaaactgatttcagactgcaaagataacagattatgttcggattcaaaccctttttggattgtatttattgatattgagattgctcaaaacgattcttataggctgtttttgatttcaaaatcagaaaaaagataaactttgcttcgtttataggttaagattcgtaaaaaacttaacagcgaaacagtgtaaaattaagaataagaccgttaaaatgtcaataatcttagctatatttgagttccctaaatttgcgatttccaaatattctgaaaaatatacgagaatttgtctttggggacaattatgggttttcggtattttctgaatagaatttaatcttaaaatttaaatctgaaaaatatgcgaaattttacttcttcatctgtaattattgctattagttttttactgctttctttcggatcttccgctaaagagagccctgtaaatcacaaattcaaagcgtttgataatgtttctgcatcgaatagatatctttttaaaaccgctgttgatgcggcagcaatcagtcagttttacaaaaagtatcccaatttaaaaaaatatcagaatgacgttttggatctgtataagaaaaaggaatacaaaacgatctggtacgatgataaaagtgtgagcgaatttggtgcgttgctgtatcataaggtacgcttgttaaatgagcagggaattaaagctacgatgccttatatgaatttggtagatgatgtttttaacgagaacgtaacgaatgatcttccggaaattgatacagaattgttgctgtctaatatgtatgtgttttatgcgagcaacgtttattcgggagttgatccggctacactaaaaaaaattggatggtttcttcctgcaaaaactatttcttattctaaaatattagattcgctgatggttgaccctggacgactgaataaagacgaggatcttttgtttggacagtactacaaacttaaatcagtattgaaaaggtacagaaacattgagaaaaacaatcaatggacaaaaattgatattgacagtataaattataaagacctgaagccttttgatagtggtgttgccatcaagcaaatcagacagcgattgtttgtggtgggagatctggcacaagattctaaaagagatgtgtatgacgaggagatgatggccggagttttaaagtataaaaaaaggtacggacttaaactgaattataccttaacccgtgatcatatcaatcagatgaatgaacccattggtaatcgtatcaaaacgatcatgctgaatatggagcgctgccgatggatacccgcctcattagcaaaggccagcgagtatatcatggttaatattccatccttcaggctgatttatgtgaaaaatggtaaatatgaactcgtttcggatgtctttgtgggaacccgaatgaccgagaccgtaatttttagtggtaatatggatcgaattgtatttagtccgtattggtatgttccgcagagcatcatcaaaaatgagctgaagctgaaaatggcagaagataaaaactatctggccgatcataatatggaatggaacggaggcaatgtaagacaaaaaccgggacctaaaaactctttaggattagttaaattcatgtttccaaatccaaatgacatttacctgcacgatacccctgcgaaaagtttgtttgatttcgaaaaacgtattttcagccatggctgtattaatgttaaagaggcaaaaccattggctttggcaattttgaaagacaatcccgactggccggtagataaaatcgataaagcaatgagcggtgaaaaagaaaccacttgtatgctgaaaaccaaaattccaatttatatcggatactttaccgcctgggtaacggatgacggggagattggtttttatcctgatgtttacgacagagataaacaactggataaattattgtattccgattcagttgtttcgaaataaaaaaaagaaacccgccagatcaatatgatttggcgggttttaaaaaaatggtctacaagtttatatcaaatttacttacattttagttcaatgttttctgatataatgccgatgtaatatgaaaatagtacaatgcaattggactatattgaatatacaattcggtattattcgtattttaggtattttaagatatcaatcttagttacctgataagcttttgctaaaacgatgataagcgttaaagccaacagagaaaccagagcgatactgaatggaattaccgaaactccaattcggaaggcaaagttttccagccatttttgtagcaaaatgtatgccggaataataccaataacaaatccaagtaaacaaaagccaacatattgcttggataattcttttaataaagcatctgtttcggcgcctaatgtttttctaatggcaatttcttttagtcttcgctccattgaaaaagaggccaaagcaaacaatccgaaaatagcgatgatgatgaccacaaggtttagaatgaaaaacaaatttttctgttttacctgctcctgatacgttttagcaaaacccttattaacgaattcgtattcaaaagggtaatcctgattgatgtttttcgtccagtatttgtctagttttgctaaggtttcggttaaattattgggagaaacttttacataaatttcttcaaaattattccactttaacgttttaaggttaatgaaaatcaggggaggaactttatcctgtaatcctgtgatgtggaaatcttttactacaccaacgattttaaatttcatatttcctttttcatttccccaacctgatgttataactgtattaagtggttttttaaggcctaacattttgacaagggtttcgtttaccagccaattttcaatggtatccgaagcaaattttggagataaatcacgtccctgaataattttgattttcatcatatccagaaaaccaaaatccatttcgacatttccggattgtacagaaataccgttgtgtgtaagtcctgaactggaataagtgctatttccgaaagaaccggcaaaggtggatacgtctagaacaccggacatttttaaaagttcttgttttgtggtttgatatttagataatttcgttttgtaatcctggaaattaaaagggattttaatgacctgatctccactaaaaccaaggtctttgttcatcatataactcacctgagaattcacgattaaagcacctatgataaaaaaagcagcgataccaaactggaaaataagcatcgaatttcgaatccatataccgcttttacttctggagaagtttccttttagcacttttaaagtctcaaaattggagatgtaaatggcaggcaaaattccagccaaaacgattactaatccgaaaataaaaatgagctgcaggtaaaattcactgccgttcatcgttaaagattttttcaggaaagtattatagtaaggtagtgaaagttctacaattgccaaagcaaaaagaatggctaaaaccactattatagcggtctcaaaaataaattgaaggacgatttgtcttttagacgctcctacaattttgcgaacacccacttctttagcacgttttattgccgatgctgtcgctaaattaatgtagttgactaaagaaagaatcagaattagaatagacagacctaccataatataaagcaattgcagatttccttttccctcaggaaaactggcgccttgtacagattttatgccgtgtagacgagcgctacttaatttgtccagcatcactatgatctcaccattttctttaatgtactgttccggagtcagtccgttggctttggcatctttcaaagtccggttaacgtaatttatgtttcgcattttcttttcaacagcagcgatatcggcccctttttttactttaatcattaaagcgtaattaaagttaccccaactttgttcgtcgttttcacgggcaattccactgaaaacgtagttaggttcaaaagctgagggggttatgtttttatagacagattttaccgtgtaatctttgtaattgtaagtaatggatttgccaattggatcctgattcttaaaaagcagttgtgctgtttcttctgatattgccacactgtttttctctttcaggatattggttttggctccttttacgataggcagggggaacatatcaaaaaaactattgtcggaaactgcgatctttttgtgaaagaatttttgcccttggtatttgatcatatcattattataccaggaattaaaaaaacagattgattcgatttccggaatggtggctttacaggttcttccaaaaggaatattgttgtaggaccaaatatccccatcctctccaattctattaaaaacctgatagacgttctctttttcaggattccattggtcgtaggcattttcgttattccaatatagaatggcgaaaatcactcccgcgattccaatgcttaatcccaggatatttaaaaacgaaaacagtttgttttgtttcaaatgatatataaatatcttaaaccagttaaaaatcatgttttattttttatagttgttacagttggttttgaaatagttttacaggttttgaaatctgtaaggcattataagccggatagtattttgcaaacaaatcccatcagaattatgattgcacttaggatgaatttgatcattttatcgttatttaacgtccataaaaacatcaacattacgttggttgaatttttcagagaataccaccccatctttcatatggattgttctttgcgaaaacgaagcatcataatcagagtgggtaaccattaaaatggtagctcctttagcatgtaaatcggttaagagttccattacctcattaccgtttttactatctaaatttccggttggctcatcggccagaataattttaggatcgtttaccaaagctcttgcaacggcaaccctttgctgttgtccccccgaaagttgttgcgggaaatgtttaaggcggtgagagatatgcagtttctcggcaatagcttcgactttttgttttctctcagccgcttttacattgttgtagatcaaaggcaattcgatattgtcgtaaaccgaaagttcgtcgatcaggttgaaattctggaaaataaagccaatgttttctttgcgtacatttgctctccctttctcttttaaaccaatcatttcctgatctagtaatttgtagctcccgcctgaagcgctgtccaaaaggcctatgatattaagtaaagttgattttccgcaacctgaaggccccataatggttaaaaaatccccttttttaatctctaaagaaattccgcttaaagctgccgtttctacttcttctgttctgaaaactttggttaggttttgaatggttatcataagttttgaaattttagtggttgttaattctattttttgattgatgattgaaactttgtgaattgtgaattataagatgtaaaatgtaaactgcgaccgtgtactgcgactgtgtactgcgaccgaaaaccgcgactagaaactactgctgagaactgatcgataattcttcaatatctttataatcgctataggaggaagtgataactgattcaccttcttttagaccttcgagaacttcataatacgatgggttttctctgcctagttttatgtttcttctttctgctttatttccttttattacaaaaatccattttcctgctgactcctgattgaaacttccttttgaaaccacaagcgttttgtttttttcggagagaatcagttttacaccaaaactaagaccgtcctgtaaagtgatattttctttggatataaaagccagctccactctaaagtgcccgttttttacctccggaattacttttgtaactaaaacttccagattttttccttgaaattctacttgacctttcagtccttcgcgtactttttccaagtaaaattcatctacatcggctgctaatttgtagccttgcttagaatctatttttccgatactttcacctgcctgaaacgtttttcccaaaaccggttgaaaagaagttaatctccccgattccggtgctgtaattaaaaagttctttttattgtttcttaaaatatccagacttttttccatagtctgaatcgaacggttgatttgagaaatttgaacctgattggtttgtttttctttttgaatactttgttggatcgttcttttgcgctcgtcctgaaaacgcagactttctttaaaattattccagtcatttctcgaaatcacatctttttcaaacaatttcgcgttcatgtcgtacagccttttggcgtcattgtaatcgtgttcgattaaaaccaggtctttggttaagttcagctcctgatttctgatgttcagttttccggtgttcaaattattgatttgctcgataatagccgtttcctgagtcaaataattcagttctgtgtttgggttgaacaaacgtgctaaggactgacctttggtaaccattgcgccattttcaacaaaaatctcttttacagaaccgccttcggtaacattcacaagcattacgttaagaggttctactttggcctgaaaaacaacaaaatcttcaaagaaagctttttctactttttgaacgctaagttcatcggcttttacatttaaacttcttttggtgttaaacgagaaaaatgcaattgtcgccaaaactaaaaaaactccaattgctattgtgagatatctaaattttctatttttacgaggaattatcttgtccatttctttaataatttactgattaccaataggtaaatactgtgccataaaaagtataatctgtaaagtattgattttaaagaagctttaaaaaccatctaaaaaagaagtgttcggaaatgaacagttgaccgttcagaatcggacaaaaaaagacagcatgcgaaagaaacaagcccatattttaatcgtcgacgatcaggaagaaattcttttttcggcaaaaatgattctcaaaaaacattttgaaaccatttttacggccaacagtcccaaaaaaatcatctctattttaaacgaaaatgaaataaatgtggttttgttggacatgaattatcgaattggttttgaagatgggcgcgaaggaattcattggttgaaggaaattaaaacactttcgccaaagactgttgtgattttgatgactgcttttggtaaaattgacaccgcggttgagggaattaaaattggggcttttgattatgttttgaaaccctggaacaacgaaaaactactggaaattattgataaggctgtagtagagagccgaaagaatggtaaaaaagaagtagtagaaaaaccagccaaaagttattttacaggaacttctcctaaaattaagcaggcttacggtattgctgagagagtcgccagaacagctgctaacgttttaatcttaggtgagaacggaaccggaaagtatgtttttgccgagttcattcatttgaattcagagcgaaaagaacagccttttgtgcatgtcgatctggggtcgctgagtgataacttgtttgaaagtgaactgtttggatatgccaagggtgcttttacagatgctaaaacagataccgcgggaagatttgaagcggcttcgggcggtacgatctttctcgatgagatagggaatattccgttacatctgcaatccaaactcttgcatgttttacaaaccaaaaccgtaacccgtttgggcgaaagcaaagcaagaccgctgaatgtaaggatcattgcggctaccaatgccgatataaaagcagaagtaaaaaataaaacgtttagggaagatttactgtaccgaatcaataccatggagattcatttaccttctttgcgtgagcgaaaagacgatattatcccaatggctaattttattttggataacattgctgaaaaatacaatcaggaaaattggtgttttgacgacaatgtcggaccctatttagaaaaatatccctggaaaggaaatattcgggaattagagaataagattgagcgggccttaattttggccgataatcatactatttcggtaaccaatctggatattttggatttcgaagaacttccggaaaacgacgaaaatccactgtctgaaatggaacgaaatgccatcgagaaaacattgtttaagaataatgggaatatcagcaaaacagccgaagaacttgggctttcaagggccgcgttgtacagaagaattgaaaaatacgatctgaaaaacatctaaacttaaaaatagtttcgaacggctttgaaagattttcattagatattaaacttttgaatctgtcggaataaaaaataaaacaatgaagaactggaaattttataacgctttgtttgcaaggattctgctcctgatgattccctttttcttttgtgtctttttggtttacaaagaactgtattacaatgcgattctggttggttttgtcgtttttctattgttgtctgaaatgtatttttttgttaaaggacagaccttgttttacgataaaatgcttttatcgatcctacaggatgatttttcgaataattttccggaagaaagtaacaaggagaatttcagaaacttgtttttgctttatgataaattaaaggttcagcgacaggaacagacgtcaaaagagcgcgtctatcagtccattttaaataatatcgacaccgctactttaattctggagaaagaaggtggcgaggactggaatctttttttaatgaacgattgcttctccaacttattcaaagtgccaaaagtaagccaatggaagtatcttaaaaactatttgccctctctttgtgaggaaatcgaaaagaccgattttacagaattgaaaacggcaatttcgatcaagatcgaagatcaggatttacagacttttgtgcttcagacttcgcatacgaaaatgtatgacaaagaatattttattattctgctggacagtattcagcgtgttatcgagaaaaaagaaaaggaagcctggatcaatctgatgaaaattatttcgcacgagttaatgaattcgctaacgccaatccgtgcactttcgcaaaatttactgcaaatagttgatcaggaggaattagaagaggatgattttgaggatattaaaagcagtatttcgaccattatcaatcggagcgatcatttgcaggtttttgtagaaaattatcgaaaactggctatgctgcctactccgactaaaaaaatgactcctataaaggttctttttgaagactgtcttcgggtaatgagtccaattttaaagacggaagatattgaactggtaaacgagattaatagttcaagatcgattttaattgataaaagtcagatagaacaggtaattatcaatttgattaccaatagcatttatgctttgaaagaaaagcgcgaaaagaagatgttcctgtcgtcgtatactgaaaacaatcgcttttttattgccatttcggataacggaaaaggaatcgataccgagatcagagataaagtttttctgccgttttttaccaccagaaaagatggtgccggaattggactaacgctttctaaaaatatcatcgaagcacacggtggctatttgagttaccaaaccgatgaggagaaaaccagttttgtaatttgcctgatttgattcagatatcaaaaagtaaaatggcaaacaagttatggttctaaaaatagaatttgggattgtcatatgtgccccttgcgtctctagcggttaaacaaaaaactttaaagctcgatttccggctgccagaagtgtttttcaaaatctataatctgattgtctatgactttaatgccttcactttcgagtaattgttgcattaaatgggttccgtcaaaatgatgttttccggtgagaagcccttttctgtttaccacacgatgcgcaggtacatcatccatgttgtgacaggcattcatagcccagcctaccattcgggcagaacgggctgttcctaaagctttggcaattgcgccataagaagttacttttccgtacggaatttgtctggcaatcgcataaactctttcaaaaaaattatcttctgccataatttgtagcacaggttagagggtgagaaatgattttactaacgaaattttcacgcagattttatgcattaaaatgaagcctaatttttttaatttaggaaggaaaaaggatctgcttaatctgcaaaatctgcgtgaaactaaaatttacaaataaataataatctgattttatattttattaactgaaatagtaagtcaaaatattaaaaagcgtgagtacagcaattaatcctgtgatgcttccaataatggtattcatgtttttcatcagataatctgttttcttctcgattcttccaaagaaaccaatgtagctgtataaagcggcaaatgagcctaaaacagatccgaatacaaaagtaaaaataatgttgttttcaaatgcaaaaaggtggtaagaggccaaagtaacacttacaaccacataatacggaatagggaagaagttaagtccggaaagcagcattcccagaaagaaacggctttttttactggttttttttattttcgattttttggctttcggttctttggctataaacaaaaaataaacggttaaaacagagaaaataacaaatcctacttcgcgtaataatgtcaccacatccgggcgattgtcgatgactcgtgcaaaaaaaacggctaaagaaacctgaaaaaagatcactaagacagctccggcaacaaaccataaagcattttttttcccctctttcaaatttactttggctgctgtcatgttgattaaacctggtggaataatcccaatgaaagcggcaagaaaacctgaaagtaatggggtaagtaatgccattcagctgattgatgggttatgaaaaaagtttttaaaattaaattagtctttaattttaaaacgaatatacgtaattgccttgttaatctctaaatattgtttttcataaaaagtctggaatgccgtaacttcttcagggcttccttcatttttatatacattatgattggcgtataaaacctcgtgaccttcaccgtgaagtagccccaacgtgtaaccgtgcatgaattcgctgtcggtttttaagtttacgacaccgtcttttttaaggattcttttgtataatttcaggaactccgaattggtcatacggtgtttggttctcttgtatttgatttgcggatccggaaaagtaatccagatttcgtccacttcattgtcggcaaaaatatgattgattagttcgatttgagttcgaacaaatgcaacgttgtgtaatccgttttcaacagcggttttggcacctctccagaaacgggctcctttaatatcaattccgataaaatttttgttcggatatctttctgctaatccaacagaatattctccttttccacatcccaattctaaaactaatggattatcatttttaaagaaatcagaattccattttcctttcaaaggcattaaatcgcctacaacttcttctctggttggttgaaaaacgttttgaaatgtttcgttttctctgaatctttttagtttatttttacttcccacttttacaaaaattttcagcaaaattaaggaatataaacgaatgaaaatagtacaattagctttaaaagttttcggccacgaattttcatcaaggatatttttcttcgccacgaattcacgaattaatttaagcggtttggttggaaaaaaattagtgcagattaaatttaattcgtggcaaaagaaataaaagtttttcgccacgaattcacgaatttccgtgaattaatttaagcggtatgtcggaaaaaattagtgtagattagtgaattcgtggcgaaaaaaaaagatttcttaactgtactgcggttctgcaatagattttaattttggatcaagcgtctcatcgtgttgggagagatccaatccgatatgttcgttctcttcagaaacacgcaatggaataatgaaattggttaccttaaacaagaagtacgctccgaagaaagtaaatacagaaaccaataccaatgccatcatgtgatgcgcaaatacattccagcctccgtgtaacaaactcgcatcttcaccatgagcaaaaatagcggttagaatcattcccataattccgcctacaccgtgacaggcaaaaacatcaagggtatcatcgaatttttttgataagcgacaatttaccactgagttggaaaccagagctgttataaatccaaagaacatactttcaggaactgacacataacctgcagccggagtaatggcgaccaaacctaccacagctccaatgcaagcaccaagagccgaaacttttcggccgttcattcggtcaaagaaaacccaggttaacatggctgctgccgatgaggttgtagttgtcgcaaaagccattgcggcggttccgttggcagcaagagccgaaccggcattgaagccaaaccatccgaaccataacattccggttcctagtaagacaaacggaatattggttggaatgtgttgattgttttttctttttcctaaaaccagtactcccgccaaagctgcaaatcctgaactcatgtgtacaacggttcctccggcgaaatcttttacgccaaaataactgcctaaaatacctgttggataccaaacggaatggcacaatggcgcgtaaataaaaacggtaaacagactgataaaaagtaaatacgatataaaacgaacgcgctctgcaaaagaaccggtgataatggccggagcaataatcgcaaatttcatttgaaacaatgcaaaaagcataaacggaatcgtgctggccaattgtttatgaggcagaactcccacataatccataaaagcaaaagtggttggatcaccgaagaaactatagaaatgcccccctaaatttagtcctacaggatcgccaaaagccagactaaaggcgactacaacccacagaagtgttacaacccctaaacagataaaactctgtaacatggtcgaaatcacattcttcttaccgaccattccgccgtaaaaaaaagacagtcccggagtcataattaaaaccaggcagcaggacgttaacatccaggcgacatcggcaggaacgatatgatcggttgtgccaaattcagataatacgtaactattttcggttatagttggccaaaaagcaccagtaacgcaaacaatactgatgataataaaggaaatgatccagcgtttttctattttcatttttcaaatactttatgtgtccctatttttttagggttaaagttatgaaaaaatgaatattatggttttaaggggtgtaaaaacagaggtgttgtttttattttagtggattttgtaaaatacaccctgtttttttgagggtattttattttgcgcttctaaaaaagagacaaaattgccaattgtattataataaaattggcaaagtgtactgtaaagggcgtaaaaagttaggattgtaaaaagaaagtccaaaaatgtttattttttttgaagctttgcaatcaaaacgtcttcgataggagccttaattttgatcgctgcatttacttcctcattaggaaccgtcatagataacacataatgttgaattttccattctttccctattttaattaaaacccccgatccgcggcaaatcttcatttgtgtgtttaacagttcatcaaaccacgcaatttttccggttttgtcgaaaaagatgtgacgttctaaagctgtgaaattccaggcagttcctttgtcaaaatagggtttagcccaaactttaaaatcttttttgatccagttttcggtggcatcagttccgatgaaaatagcatcttcggccattaaatcaaaataagcatcaaattttacttcgccggctgctttgtgccaggcatcaatagtttggttgactttgtctttttcagaagtctgtgcgtttgcaaaaaaggtaacaaataataaaagtaagattggttttttcataagtggtttgttttggatttaaagttagcaaatattttttgaaaggttctgaggttctgagatgcagaggttctgagatgcagaggttcaagacgcagtgctgttaaacgtatcgtttgtcatcctgaggaacgaaggatcacataagaaactctacaaagattggcgacattctgtgtagagtttctggtactatttgcttagtccgcttgctatcgctcgagtctataaattttaggggattaaatttattaatgttgtgcatgcatctgcttaaatctttttaaaatctgcgtgaaacaataacgctgcgtctttgcaaacccaaatcgccaagtaaaacttaaattatcttacatcacttatatggtataataggatttagtatatttgatagctttaaaatcgatacatcatgaatccaaaaatactcatcacctcattagtactttcctctatctttttaacttcctgcaaaaaggaattagaacctcaggaaaacacaccaaattctgaattggtaaaactgggattggcaaaagatacgacaaaagcagcccctgttgttcagactcctactgcagcaaatccaaatacagttttgagtgctaatggcggaatgaatcctgcacacggacaacccggacatcgttgcgatattgctgttggggcgccattaaattcggctcctacacaaggacaagctacaacaacacagcctgcacaaaccgttcaggtcaaaccagggcagcaaaatgtagtgaccacaacaactgttacgccaacaaaagtggctaaaggcatgaatcctgcccacggacaacccggacaccgctgcgatattccggtgggagctcctttaaattctccggctgctgccaaacaagctgttgccgccaatacagcacaaagcggaactgcttcgcaaacttttaccgtaacacctccggcgacagacaatgcggttccggctttgttaagtacagaaacagcaactgtagccgatggaaaaaatcccgcacacggaaaaccagggcatcgctgcgatattgcagtgggtgcgccattaccaaaatcataaggaagccgagaattgtataaataataatttgggcgtgccaccaatataaaaaggggctgactattgcaatcgcttagtcgcccctttttatattgctgtcgggctttcgctgctacttcggtagcttagctctatccctcacgcgagacagttttcagtctcagtttccggtctaattttgtcgtcctgagcgtagtcgaagggcgacaatgtataaaagattgttttattcaatttcaaaaatcgcctgaatttctacagccgaattaatcggtaatgaagcagcgccaatggtcgctctggcatgttttcctttttctccaaaaaccaaagccgttaaatttgaagccgaattcataagggctgcatgttgcgtatattccggaatggtattaaaatatccggtcaactgtacacattgttttactttgttcaaatcgccaccgcaggcttcttttagtaccgcaattacatttagcatcgtttgatacgtagcttctttggcctgatcatccgtaactgttgcgccaacttttccgggattcagaatctttccgtcttttaaagccacctgattaatgtacactttatgatctgaaatcgtaaacggaacataattcccaaccggtttaggagcttcaggaagcgtaatgttattgtcttttaaggttttgttgatatcgcttttagcttcaacggcagttgtttttactcctttactattttctgtagttttcaatcccgaagccactctcgccaaagcttttccttgttctttggccaaattcaattcgcttgcagaaggtctcgttcccacagatcctgccaatgaagtagcgccaaacggagtgtttccttgcggaaccgttttgtctaaagtggccgttcccataatccccgttggaacgattatcattccgtgtgaggctagaatgttccagaacgataaaatcgcagcctcttttccggctcccgatcctgccgacataaacacagtagctggttttccttccagagctcttgaagtccaaagcggaatactttgaccgaagaagtaactcatatcggcactaatattcgcaaaatgtacagggcttccaaatgcgattccgtcataattggccaattcttcgatagttgcaatgggtaatttttctacatcagcattcagtttttcttttgaattgatcgaaggaacacgttttagaattgcttttgcattgggatattcctgaattccttcggcaatagacttggccattttataagttccgctattttgggaatagatcaaaaccagcacattggtttcagctgattttacttgtgcatttgaaccaaaacctataaaaagagctgttaataatagcagtagttgctttttcatgaggggtaatttttaataatttgtaatggataatctcaattaagaaactttttatttaaaaaaacaagttcttcttttgggattgcaaaattacttcttacaatatcaaaaagcgttattattatcttaattaaggttttttgggtataatttattttaggtcccatcgggacgaatatatttataaaaaaaatcaaaacaatatatttagagctccggaggagcaataaatttataggaaattaaaaatgcacatcaacagaaccccatcggggtgacctatcaaattgtgctaaaattatatgtcgctccgctggagctggattagaaaaacgcatactcaaattagtctatagatatatcgctccgttggagcttttgcttaaaaagaatagaaaaaaatctgcgttatctgcaaacccgagcgatagcgaacaggcgaagcaattcacgaattattataaagcaataattcgtgaattcgtggcggaattttttattcaccttttctaaagaaataaattctatgtattcaaaaaaggcacagaaaaatctgctcaatctgcggaatctgcgagaaaaaagtaaacacatttctctcaaatagctgtgtgttcagaaaaataaaggcacagaaaaaatctgctcaatctgctgaatctgcgagaaacaaaaaaaagtaatcattctaatctgtgaaatctgtggcaaaaaaaattaacttcgagcaaacaaatcgccttacttatgaaaaaagcaattctgtacggagcaagcgggctagtaggttcctatattctcgacaatttattaaacaacaataactacgaacaagtaataattgtagtaaggaaagatctaaacatccagcatcccaaactaaaaacactgataggtgattttaactccttatccaaagtggtgaaggacattcaagccgatgaagtttttatcgctctgggtactacacagaagaaaacaccagacaaaaagttatactatcaaatcgatcacgattacccgattctggcagcaaaactggcgaaagaaaacggagcaaaagcggtctttctagtttcggctcttggtgccaatgcgaaatcgtcgatattttatacgaagttaaagggagaaaccgaacaagggatcatcagtctgaatttagagcatacttatatctttcgtccttctatgattttaggagaccgaaaagaaagccgaccgatggaaaaagtattcattggaatattcaaatggatcaacccaatatttatggggagcctaagtaaatacaaaggaatagaggccgaagatattgccaaagcaatggtaaaaagcgcagaacaattggatcagaaggtaagaatagtacactggaaagaaatgacgactttactaaaataaaaaaggaccttatccggattagagataaggtcctttttatggatgggatataaattaatacgctttcattttttcgaaagtagtagttaaagatttttttgccttcgccaatgcaccaataaaagctttttcaagcgtatcggcatggtctgtaacggttactggttgtaattttgcagtacgaacttcaatcacacattttttgtcgtgcagactaaatttctccccgttttcgtctccaaaatgaacttcaacgcgggtaattttatcttcaaaacgctttaagcctttttctaattcaccagagaaataagcttctaatctttcatgtccttcgatgttcttgtcggtattgatctgaattttcataattggtttgtatttaatgattgtctctcaaagctatctttttttagacaaaaacacaaataggttaataaaacattaagaaattaattgcagttttttttgtcatttcgatcgaagagagaaatcacacaagtaactccgcaaggtttgatttagatcgtagagttactcacgaggatttctcattcttcgaaatgacatgctttatggatgttttgtgttttacgtgctatttgtcatttcgatcgaagagagaaataacacctagtatcaggctgagcgacatgcagagtgtcacacccagtgtcaggctgagcgaagtcgaagccccggtcattaagttaaaaactaagaaaaccctccataacttttttgcttttcatatcttcgcagtcctaaaactttcagattatgaacttgactaaacttttgcccgtgtggtacgctggcggtattggaaacaactgcaacgctctgaaaggcgtaggacagctaacccattcgggttttatatcccttaaactttcagattatgagtacaaacaccttcaccaaagaaaccgaattaaggttggctgattttttcagcaattcgattgatcccgcaacaatggcaaaaaccattcgtcaggtaaactatgcacttgccttaagtgtaatgcaggaacacgaatctttacaatccgagaaaaccaacctccaaaatggattttactggctcaatcaattagccgaaattttaaatccgtatctggatgttgaataaacttgaaaagccactgtgaagtggctttttttatgagatttctttgttccgcttagtttgtcatttcgaaggatgagaaatcttcgcaagtggcttagttgcgattttcaatcctttgcttttctcttgttacatttaataatacacgaattcaaattcttttaattttaaatcttgttatgtgatcgcaaatatcacattttacaaaactatcattatctacaaacatatctatttcaatttcgtaatcacaaatagggcaattataaataacgtctataagttttataggcggattgagtacagttgggatttctaatattgaatattcaatgaacctgtgaccttcgggttatgagcccgacgagctgcctactgctctatcccgcgatgtttcgggtgcaaagatacacagttaatacggttatgcaagctaaaaatgaaaatatttttaaatatcttaattttagatgcaaagtactggcgtacagtttgttgtgttttgttgagaaaagtttaaattttatatttcagtaattcagcatacggatctccatttaaacctaataaaaaagcaaaagcaggttcagttttgtatcccttttgtttgagtttgacaatctctaatcggaaattttcaccttttaattgcagaatttcatgttctatgagcatgtgcagatgcgcattctgttgttgagttggaatattttgtccaaagatttcaaattcaaaagggcctattctaaaacttgcaataatcgattctctgttatcaattactgtttcccgaatggtataattgtttttgtttccaaaagcagcatggagtttttcgataaatttagttttgtttttccagtaacaaatgatatccaaatcactactttcgatatcaatcgcaatggggatggtgcccactaaaataggatcaaattcaactaggtcgcccaaaatattatgctgagtcagggttttataagcctgaatttgtttgctgtttccgttttttagatagtcgatagtggtaaaatcaatcatttactataattcgtttcttctttaatttcagccttcagtcttttgttaatgtcgattttggcattgataaaaacaaaaatagtcgctccatactctcttgcatatttgttggtgatctcacctgcaatacgtgaagattgaaagaaagggctggtttcctgaagttcggcagttctttcccaagagtttttaactctgatgacatttttgtagggtacatcaagaacaaaccaattgagataatcggcattaaaagacaccgcttttatcccttttttagagtaataatttatggcaccggcttgtccgtaattatcacagagtaccagtgttgttttaggatttggaattagggcataaacagaatctgtttttcgggcgagttctttccagcccagcatatcggcaaaatcttgtggcagttcgtggtcttttccatcttcccaacgcagcataccaagttttttgtaggcctctggatttttcacgatgtattccggacttttattaggaaaggctaagtcgtacatcggaataaaaaataacaatggaaggataatgaaaacaggttttagataacgtttccagcctgtttgcaatacctgagaaagaaaaacagctccaaaagcaatataaacagggtacaaaccgatggcataataagctttggctttgaaatacagaaacactgccagtgtaaaaaccatcgaagcaaaaaagaatcggtatttttcgaatggcttgtaaaacaacaatgcatataaagcggaaagaataacaaagagcgaaccgatgaaaaataacaattgcttttttaaaaaatccattcgatctacattaacaagctgcgtttcggccaactctttcatgtgatgtacaatggggaaatggttgttgtactgccataaaagatttggcaaaattagaactactcctaaaagcagtgccccatagagttttttctctgaaaatatttttctttgacgggataataaaagagcaggtaagaggccgataaggagaaatagcatattgtatttgttcagaaagccaaaagcaaagacaacggacccaatgtaaaagcattttttgttttcggtggtcatgtactgcacaagcacataataaaaagaagtccagcataagatgtccaacgagttaggctggtacaagatattgattcgtaacaaggtcgagaacgtaatgcaggtggcgcctaaaattagggcgtataagtttcctttcaaagcctcaatcgttttccaaaccatcaagagcgttaaaactccaaaaaggacagggaaaaacttgacccagaaaaccgaatttccaagtaaaaggataaggtaagaaatccaggaagtaaccggcggaaccgataaatagccccatgccaaatgatgcgcctgatccagatgcaggtattcgtcgcgctgcaaatcatattcgggacttattaagatatattgcagtataaattttaaggcgataaacccgagtaaaatgatggtttttttggtcatggtggtttttggttttttaaacggtcgtttttggtaatagtttaaaattaaagctaatataagtttattttggattttgtggtgagatttgttttgttgtaatctttctgaaatggaataaaattacccgataatggagcaggattgcacttttaaattagataacttgcaataatcaattatttagaagataaatatggtcttccttaaaattcaaattgatcggttttgaatttcaccaattcagaatcggttttatttcattgatttatttttttttaatttaacaggttattgttttgagagaattatctaattgttttttaattgttttaataaatattttttttatgaatttatcctttggacaaagtagttcaaaagataaaatttacacgcaaactgattttgagaaaaacaaaatatttaatgaaacttatagcttttgggacaaagatcggaagaattggttttcagtatcagctgacacttcaaaaatatcttattttgtagatgcccgaaattataaagggatcgttaattacggggtaacttttcgcactaaaacttttaggaattttaacttttttgagcatttgtctatgtgttttttaaaagttgaaattagtaagtgttcctataatccaaaagacagtattgcagacattgaaggttttgtgagtggaaataatgaatggggagctaacgttctgattaaaacaaaaagagaaaaggagtacgtcgaaatctttttgggagaaaaaataaatacgacaaagatctgttatttgggacaaaccgtcaacaaagattctgtcgaagtaaaattaaatagtaaagaagcaaatgaatttactgtcttggatacatttcctgcgttttattttaaaaaaaaatattctcattacaagacagttttgggaaacagatttccttttaaaataagcggtaaagtcaatagaaactcgctgcttgctttcggttcaagttattctgaaatatttgatataggagctatgatttatgattctgaaaagaataaacgaaacaaaataatccgtagggaaaattatgactgcatccccttaattacagctaataaacgggtagcagatattgagaaagaaaaagtacaaaaacaggagatcaattattacacttatacacagaatgctgagaactatattctaggcaggcagtttggcaaagcaaaagaagagtataatgttttagctcaaaaatatcccatactatttgcgagagatattcataatgctatgcgttgcgccatactgtcaagagattataaaaatgccttttggtggggagaaaaactggcattaaaaggcattgaattgccgtattttaattctaaaatttttgctgttttgaggaaaaatgcggaatggaagagctttagtgtcaaatacgattccgtttctaaaaatgcgcagtataaatggaatttaaacctaaaaaaagaattaacagatttacttgatgaagatcaggctgaatatgggcttgaaaaccgaaagagtccgaaagtattatatgaaacaacagaaaaagttaccggtaaactgatcgatttactgaaaaaagaaggttacccttccgaagaaaaaataggcagtcttgtagtaagggatactgttttgatcccttttcctgattttaatgttttaatccttcatgccatacaacaaacgccaaaaaatagtaaagatctaaacgaactgttggataaaagcactattaatttggaatacgatcaaaaaaggagttttaataacaccatagggtatggatcttgttttcgtatttataaaggcaatttatacagttccaagtcgtgtggaagaactaatgatgctgaagttcgaaaaattgcattcaaatttaacaaccctaatggttttattacagattatggtaattatgtggttgaagcacacgattccaaagatgaaaaattggttgatgaggactataaaaaaaaatacaatttaatcatgaaacttacggatgactgggcgttttatgataagtattaataattaggattttgatatagtcaaggtgtagatgagtttgtaaataatgttatcgactgcttagaccggggttttgtaagaataggggaatctgataaggttgtaattgaaagcatgaattttagtaatgaaaaaagctcttatactttgaaaaacgctttatttagaaaatatagaattagaagaagtgtaaagtgtctggtttaatgggaggtgcatcaattccagggagaacgactatgaaaataaatgttatgaagttctcaatgatgctttcgtgttacaaaagccggttaaaaaaattggaaagagtagtccgttaaccggaattcaaactaatatacaaagcttcagagaaatccgaagctttgtatgaagatctaaacacatttagttggctctgcttctttcttcctcatttccaaaatcacgttgtttggatttgatgttttgattaccaaatttataactcaatgaaattctgaaacctctcgtgtctgaatagctttttacattggttttaatatggttggaatcataggaaatcaatggtttttgtgcgttcagtaaatcttcgccaatgatggtaaccgaaagatttttgttgaaagttaacagcttaacagagatgtcaagaatatttaaagtcgaaatattaaagatctgataacgaccaggaagctgtaaaccatagtttaagccaagaaataaggttttattagtgtttatggtaaaatcattattgctgtaaaggtatccgttataaccatcgatggactgaataaatgcagtttttgattttacattctgatagtttaaattgaatccggtaaagctgttccaccacgaccatttgttgaaattataagaggtcgaaagtccaatttggtaagtattagcatagtttaaaggcgtgtttctggtaacattcgtattcggatcgatgatcgataattcctgtccaaaatcggaaacctgagaaaagtaaacagagtttacccatttttgatttcggataaacgagaactcaaaattatcaatcaatgaaggctttaagtacggattaccttcggaataataataaggacttgttttaatgacaaaaggattcaaataatcaaaatcaggtctgcggattcttctgctgtagtttaaggaaaaagaattattttcgtttggtacataagtcagataagctgttggaaataatttgatgtaattgttggtgttcgtttgattcaaattttcagagtaacctttggtttgtgttgcttcgattcgtagaccaatttgagtttcccattttgaatttatttttttacttccggagaaatacaaagcctgattgtattctttataattgaaaacattggattgattggtgttgaagacgggagttccggtttcgttatcgtacacgatcagattgttgtttgtattggtgtggaaagttttcgctccaaaactaagatttgcccaatcgtacggtaaagtaacgtcaatattggccgagtaatttttgattgcattgacatttgaatttgtcgaagaaaagtaacctccggggatattatttttactgctgtccagttcattccctgaaaagaaacgataatctttcttgttatactcaaaataatccaagtccatcgaaatattttttcctaaactgtctaatacaatcgaattatgaaagttaacggcattcattttcgggttatttttcgcattcgcattcgaagcgatataggaattcgccgttccgtttgcattatcataaatagtggtaaaaggattgtttgcatttactttatccgtaaaactgccaaggtatttaagtccggtactccatttttcggttactttataatcaagaccaaggcctaaacttaaaacatcggctgttgatctgttttgaacgtcctgtttccaggtttcgtctttgtagaaaatagaactttcagaagtagtcagtaatttttgtttccctttgcttgcagtggcctgtaccgaaaggttatcgtgattgtacgtaaaaagtccgttcacgtttccgcctgcgtatgttttttgtgtgtaggatgttccaagattagcattccatgagtttgcttttgccgtttttaatttaatattaataagaccgctattgccttccgcatcatattttgcaggcggagttgtaattacttcaatacttttaatattatcagagggaattgatttcagaaatgccgccagatcttcctgaggcattctttgcaaacgatcgtcaatcattactaaaatttctcctttacctacaatcgaaacaacctcgttttgaacccttacggtaggcgtcgcttttaaagcatctaaagcggttcctccggtggctgttacagaattttcgacattaaaaacaaggcggtctactttttgttcaatcagtttttttcttgatttcagcgttaccccctccagctgtaccgattctttaatttcaatgatacccagatctgtatcgtgatcaattgtaacttcgcggttcatatattctgttccaaattgttccaatatcaaacggtaatttccttttggtactttcagaacaaaactccccaaactgtcggttgaagcctgagcaattaaagttttttgagaattgaacaaactgccgatgataaattcaacagctgatttattttgattgattacttttcctttaagttcgtattgctgagcaaaagaatacgtttgaaataaaaaggcaagtactaaaaggctactatttttcatggtttttagattaattacgctgcaaaactgcgccgaaaaaatgcctaaaactacttttatcgacaaacccccgggattaatctacaaaccctgttttggacttttttatgaatgcatatctttgaaaaaaacaaaaagatgtataaaggaacattatcaaaaaaagtagaagtattcattcacattatatattggcttttgatggggtatttcacctttgttaaaaatttaatccaggccaaaaactacaccccggatctgttcctgtctacgtatatgattgtgtttgtactaaccttctattttcattattttgtggtgatgaaattggtttttaaatcctttcaatggaaaagattttttgcaggagtattggtttcgtacttgttttttacggccttacgatggctgttggagcaggagataagtcaagttttattccatagaatcaattacaccaatcccaccttttttaattatatggaagacaatctgcactacagcagcatgtcagtcattttaagttcactgctttggtttgtgatttattttattcgtttgctcgagtacaatcaggttattttggaagaaagcaaaaacaccgaaataaaatttctgaaagcgcaaatcaatccgcattttatctttaataccctgaacaatatctattcgatggtgtattttcaatccgataaatcgttgatggccatcgaaaaattaagtcagatcatgcgttttaccacttatgaatctcaaaaagaaaagataaaactggcagatgaaatcgattatattaaagcctatattgagctcgaacaattgaggcatcaggacagtgcttttattgatttcagaattgaaactcaaaatatttctgaagaaattccgccttatatcttgtctccgttaattgaaaatgctttgaaacatggcgtaacatccaatgaaaagccaattttaattgagttacgtttagaagataagaagcttaattttaaagtagtcaatgatattgccgtgcaaaagaaagacaagctgggaggcattggattaagtaatttgaaaatgagactggaaattcattatccgcagaaacatcaaataaaagtagtcaatcaaaacaaccagtttacagctgaacttgaaatagaattaaaatgaaaaaaataaattgtatcatattagacgacgaaccttttgcagtaaaattaatggcagactatgcttctaaagtgccgagattaaatgttttatatgctgattcagatgtttttaaagccattgagatactgaacaatgagactgtcgatttagtctttatcgacattcagatgccacaattaacggggattgaattgatgcagatgttcaatcagaagcacaatttcatcatcacttctgcgtatccggattatgctttagatgtttttcagtttcatgttatagattatttactcaagccaattgtttttaatcgtttttatcagagtgtagagaaatttatccgttggcaggaaaccatgcaaaaccagcaaaccgatgattttctgtttgtaaaagctgatcgaaagcatcataaaatagccaccgaaaatattctttacattgaaggacttaaagactacatcaggattcataccaaaggcgaaaaaattatggttttggaaaacatgaaagatattctcgaaaaacttcccctaaatcaatttgtccgcattcatcgttcgtacattattccaaaaaataaaataaaagtgatcgaaggcaatcagatacaattgactggcggtgaacaactccctattggtgaaacttaccgaaaactggtgagtgactggctgagttagtggtctgaaaactacaattgagtcactttatatagacgaacaataattaatcttaaaacctgtgaaccaaattcacaggttttttatgtttttatttgtaggaatataccgattgtttattgaaaaataccagttgtttcttttgaagttggtatctggtgtacgtgctctaaatttactatcatatcgattaaaagaaggtaaatagttgctagtctataataattactataggagaaaaacataattgctatttgagaattttgagattctataaagtatatgggtagaaaattaaaatacaatctcaacgaattttagtttaaggttcaatagagtaaaatgtaattttaaataatagaagagtgatgcaaaaaaagacaaacgcagttcttaaatatataaaagagggagttcttttttatattttagtgttaatggttagttgtcaagatgacttacaccatagtgaagacaagaataccttaagtcttcatagtaattacgaaataacagatggtactattaaaattgaaagcaaacaaaggttaaaagctattctgtcttcatatcagaatgatataaaaaatcaagatgattttaatgacgaaatcagaataattcaaaatagaggttttaagcctttaacaccgatatttgatcggaatgataatcaaaaattagaagattttgtacgtgcaaaaaaagcaagacaacaaaaaacaagttctactcatagcaaaaatattgcagaatctgtagatgaagattttgatgttgaggacgatttgatacaagacccaggcttcgctgcattattaaatgaggaaagagaattaattattggcgatagtttatataaatatactgatcatggattatacttctgcctagaaaaagacagacaaaaactttataattatttaaaagatttaagttcttcatcaaaaaaaaataatggaattggaatgactgcaaaggttccgcaagataaagatggaatttctttctttataccagaagaaagtacttttcaaatagttcctaattcaaatacactaggccaaagctctttttctgggcttccaacaccaaaattagcaaaatcgagtttagagatttcgagaatagataaggatggtttttttgaaaaaatatttggtgaaactgaagtcgatactgaagattttgatgacggtcgtagaattaaagttaagttttggaatcaaaattatttcatattttcttctttaggttgtagtgccagatttcaaaaaagagtgaagattctaggtatttcgggttggcaaaaatcatatgctgatcagattgaactaggcattaatgatatttcctatgattataattttaatgtacctgtttataatgctgctaaatataattatgaaaacttttttatagaaataaacggtgtaaaatatgtgggatcagggaagcaaattattgaatttccaagtggttcaacaaatttccctttcgcaggggcttccccgcaagaagtaacagttcgcatatttaataaagacttatttgatgtaaagtatgatgcgaataaagtttacaatcaagcggtagatttagccgtaaaacaagcatttaaaaatattgtatcacttaatccttctcaggcatcacttgccaagcaagtagagagtggcgaacttctatataaagtaattgccgtaaatccactttctaataaagttactatatctacacacggagttaaatggacaaacaataatgataatgcaattactcactactttgattttaatttccttttaacatataaatctaattacaataatcccgaagattatttaaaaggattacaaggctcaagaaaatatacaagcattagagcagatatttatggagctgctcttcatgataacatatggaaagggagaagattgattttagggaataaataagtaaaaacgaggttaatttatttggtttgattttaaaataataaaaatgaaaaggcacatcgcaattttgtcattattattaggatttgtgaatttaaatgcacaaaatgaaaacgattatttggagaataatttgttaaaagtaaatatattgtcttcaggtattacatatgaaaggagtttaaataagaatacgacattatgtacagacttgaatcttaatctgtggttttcttacaatagtaacttaggtagtaatttattatttacaccatatataagagaacaatacaggtactattataatattgaaaaaagaaattcaaaagataaaaatagtaaaaaacaattcggctaattttatagcattgaatggaagttactatctaagacctattggtaattctgtacatgtaagtgtatatgatggatttacagttgccccaatttgggggttacaaaggatgtatgaaacagggataaacattggtttggtattaggtccaagttataatttcgggacaaaaaaagaaccgtggattttgtaccagtaattaattctaccctgggatggggtaattggtaaataaaaagtatgaaaaatattttcacattgttttttttaatctcattaggaacttacgcacaaaaaattagaccttttgttggagtttcggcctacattgatacagactttgatggatcactttttggcgatctgaaaatgggagcggagtataaattagtttattatttgaagccggaaatagaaattaattatatgtttggagctcttgagaaacttactgatagagacaatacaggactgcttttatctgaatattcgaaaaaagtatctgccgtaaattatagtttttgtcctaaaattattctagggaataaaaatggcgatggtactgggtatttacaaattcttcctaaatatacttattcgagcattcaggcaaccggaaatagattatctaggaatcagggtaatttgtcaaaacctcttgaagaaaaagaaaaagtctccactaatcaacattctttcgggataggtttgggatgtgccatagatttgacagatgacaactcccagtcattggcagtaaacatttattttaataatataaattatggaagtgcactaaatatgttgaaacaagataggaaatttaaaacacaagatgtgattggatttggtttaaattattactttgttttcaaaaaaaagagcagagtctgaattctactagatgcccaggtaaaagaacagagtgtagagaaatttatccgttggcaggaaaccatgcaaaaccagcaaaccgatgattttctgtttgtaaaagctgatcgaaagcatcataaaatagccaccgaaaatattctttacattgaaggacttaaagactacatcaggattcataccaaaggcgaaaaaattatggttttggaaaacatgaaagatattctcgaaaaacttcccctaaatcaatttgttcgcattcatcgttcgtacattattccaaaaaacaaaataaaagtgatcgaaggcaatcagatacaattgactggcggtgaacaactccctattggtgaaacttaccgaaaactggtgagtgactggctgagttaagtgtttaaaaattgtagttgatttattggatacaaatcgattgcccttactaaattaatttcaagacctgtgaatcaaattcacaggtttttttatgtttttattgcgaaaacacaccgattatttcttaaaacacaccagttattgcttttgaaattaatctcgaattcgatcctatatatttggtacaattacgaagagaaaagtcataaaaacaaaatctttgtgcgtcatcaatctttattctttgtaacgaatagaaattgttgcacaacaccctgaaataccactttagcagggaactatttcccaattttttgttgatacattagaaactaagatgcaatttatttacagtatctgttcgaattgtataatggcatttgctatttaaataccacaacttttgtttcaagataataagaagaaagaacttaaatgcttcttttattcttatacgatcaatttccctgactaaccaaaaccattaattgtatatagtatgaagaaaatgactatgatgaaagcccgaacggcatctctattttatttaaaacggactttgaaggtcaaactaaccgcatttttaattattgcttcaatatgtgatgctcaatccgaaaactacgatcgaaatactaaaatttcgaaagagcttcccctttatggccttatgggaaaaagtacagaccaaaagaaggttgagggtgtcgtaaaagacaataaaggcatgcctttgaccggagtgacagtttcagtcaacggtagtaaacagggaacagttactaattttgacggtaaatatgaaattgctgtaaatgaaggtgatgtagtaagttttagttttgtaggtttcgaaactaaaactattaagattaccaatcaggttttacttaatgttactctagaacccagtactaataaactggacgagcttgttctggtagggtatggaaagatgtcccgggataaaattaccggtgctgtaacaaaattggataccaaagtattaaagaatacacaaaatgtatcttttgcagatgcgttgattggagttgttcccgggttatttgtacaggaaaattttgcctctccggatgcaccgccttctattttattaagaggtattggctcgataagcgccagtacagaccctctgattgttgttgatggtgttcagatgcccagatcaggattgggggcttttgccttaaatgctgcagacatacaggaaattagtgttttaaaagatgcggcatcaacctcgatttacggatctaaaggaaccaatggagtcataatgatcactacaaaaagaggaaataggaataacaggctgcaggttacttttaataccagacttggagtgaaaacagcagatcaatcattcaccaatgacttgatgactggttctcagaaattagactttgaagaatcactgggtttttataaaacaaatccggcattacttcaaagcagaagggcattaggcaaaaatgtaaattgggcagatttgcttttaaagaatgaagtaaatagggaaaatgatatttctttctccggaggttccgataaagcgaattattatacttctgtaacgtataataaggtcgataatatttttgggggtgattatacaagatatacggcaagcactcgaatcgattttgatttggggcgtaaattaaaagttggattttcaggaaatttcggaaatgtaaaggacgtgaataaacgtactgtaggctctcctttttcaaatgcatttatgttaaacccatggttgagttttcttgataataaaggaaatccgttaaggcttttggatgttggcagtgctgcgggagttccatacaatccattatttgtaagagataatacaattgtaaattccaatcgaaaaaatattggaggaagtgtaaatttgacttatacacctttcaaatggttaagtttgaatggagttttaggagctaattataataactcaaagggtagtacttttgagaaagtacttgtaaaaggcggaacactaaccagttctagtggtgataacaataactatacagctacgctaacagctactatagcaaagaaatttgaaaaacatagttttgacttagtattgggtaatgaagttaatgaatatgaaaccaacagtctttctgtactggctaatacttttaattctgatgctatacaaatcataagcgccgcaaaaacgatcacttcagctacagaacaaaaatcacaggcgggttcgttgtcgtatttctcacgactaaattataattttgataatacttataacctgtcattatcctttagaagagatggttcttcccgttttggagcgaataacaaatatgccaatttctggtcagttggtacatcctggaatgcttataaaaatttatttaaagagaataaaatcgtaagttctttaaaattccgtgccagtattggtacttcaggaaatgactttattggagattttgcttcccaatccttatatagttactctagtctatacatttatgcaggtagcaccgtgccatatctgtcacgcggagaaaacccaaatttaacctgggagaagaattataataagaacttcggtattgattacggattgtttaataatcgtatttccggaactgttgattattatatcagagataccagagatctattaaacaataagccagttccgttaacttcaggttttaaagagttaatctctaatatcggaaactttagaaatgaggggggtgagattagtcttcatactgtaaatttaaaaggcaaagattttaactggaccactgattttaatatcgctttgaataagggaacagttttggccttgtccgacaagaaagatattattaacaatgcgggatctaccgtattccaggaaggaagtgctatacgatctttttatattgcagattgggctggtgttaatccggtcacaggttttaatcagtacagaactcaggatggaacgctagtggattacaataccaataaaacgacaaccaacctaacagcaattactaacttgagacaggttagcaacaaaactgctatgcctaaatattatggaggtttaaccaatacgttcagatacaaacaacttgacctgtcagtcttgatatcttatgctggcggacattatgttttgaatgaaggaatctataatttatataacaatccggcttacaatcaaagtacagctgtgcttaatgcttggaaaaattccggagatcagtcaaatatagctgtaagacaagtgaatacagttacccctacagcattcctagagtcggactacaaaaattctactcaatttttagagaatgcgagttacattaaattgaaaaacttggctctgggatatacacttcaaaaaaatgttttagagaaaacaggaatcgaaagtctaagaatttatgttcagggacaaaatctttttaccaaaacggctgtaacctatattgatccggaatatgccactgcggctggaggcattggactttcttcatccattgtgagagcgtattctcttggatttaatgctagtttctaataaaaaaggatcacaaaatatattgttataaacgtttatccgctaacaataatgataaaagaatttttattcaacagaaaaaaaatgaagaacaacatatgaagacaaatataaaattattttttacggcagtgatagttactttttttagcagctgctctaatgatattatcaacaaagaacctctggatcaattggctccggaaacactttttcagacagaaggcggtttcagaagtgccttagacggcgtttatgccgttatgaaacaagatttttacgggtattattttggaatttatactattccggaagctattagtgacgatcttttaggttctgcaaattcaaaagatttctctttcgataacagtttaggcgccatgtacccgttggcgtacaatagtgcaaccggtaatgtagagggattttggagaatttcttatcaggctattaataatgtgaatacgattatcaagatggcaagagcaagttcattacccaataaagatgcttttttgggagaagccttaggtataagagcactactatactataatttataccgcttttattcaccagcttatagtattgataaaaaagcattatcggtaccctatcgatttgaaacggataaattattagatgtaaaacccaggagcacttcagccgaagtgattcagtttattcaggccgatttgaatgaagcagcagctttagctaccaatacagttaactcctacagaatttctaagacggctatttatgcattgtcagcccgtgtatgtcatgagacagctgattacaaaaatgcaattgtatacagtaatctggcattaacagatgcgagatataaattagataacacactggctgctttgcaaaaggaatgggataaggacgattccggtgaaattattttcagaatacgttttgaaatactgaaatgggacaaaatgcggcactttttgccataccggttctttcaagttatccctatttagtatcgaccgatttaatcaatctttacgataaaactaaagatttacgatttacagtatattttaaaaatcatcctaccatcgcaaacagttattatcctaaaaaacaagcaggaacccgaaccacaactgcctcggcatcagatcccggtaatatagatttaaaactaatgagagtacctgaactgtacttaatattggcagaatcatacttacagggtagtgacaatgcatcggcattaattaaccttaataaattaagaaatgccagaggtttaggaaattatacagggaccgatctgggtaaagaaattttaaacgagagaagaagagaattagcctttgaaggctttagatttaccgatcttaaaagacttggattaggttttaaaagagcagacggtactggtttattggcgaatgctaaccgatttgcattgcctattccacaaactgaaatagatcgttccgggattgcacaaaatccgggatattaatgccgatattttaggaggaagtaatattcctatttgaatactacctcctattcaacagttttaacaatggtataaaatcctttttaaatgaaaaagaaacgagtccttattttatggtttgtattacttactgcgatagttggacattcacaaagcaaaccaacgcaagctaaactaaaacctaaattaaccatactaaagaatggatttatttttgacgataattttgggctaaagactggcagtatcataattgaagacaatcaaattatagatttattgtatacgaatgatcttagtaaatatccggaagccacaataattgatatcactagaaaatttgtgatgccgggattaatagatacgcacgttcatctggcaacagttcctaatctcactagagaaaagagtaataaatacatggaggatcagctttctaaaatgatttatgccggtataacaacagttagggatatgacaggaaatgcaattatccttgccgattacaagcaagtgagtgccctgaatcaactgccggcgccttccattttttacgcagctcagtttgcgggaccagattattttaatttagtgagaaagcatactacagaaaaagatactccgtggcaacgtactattacagatacaacaaatattaaaatagttgtggcagcagcaaaaggagcaggtgtgagcggaataaagatctataatgatttaagtgcccgcatgataaaaaaaattgtaaaagaagcaaaaaagcagggattacagagctggagccatgcggcagtattcccagctacgccaaccgatgttgccaatgccaaagtgaattcgatgtcacatgcctttgatatagcctatggcttttcttcagggaaaatggatcactcaaaaaaaatacctgccatcgatactataaaaatggacaagttattactcttgatgaaagcaaataatgtgatactggatccgaccaattatctggcaaacaacaataaactttttgatgggatgaaaataactaaaagagctcacgaactcggtgttaagatatctacaggaacagattggccttatttattcgaaaaagacaatagtgtcccattgttcaaagagataaaaatattgacagacagctgtggttttaccaacaaagatgttctcataagtgctacacgaattggggcagaaagtattggagtacaagacagagggagcatagctataggcaaacgtgcagacctttatgtaatcaattcaaatcctttacagaatattgaaaatttgaaagatggctttatgaccattaaatcggggatcatttatacgaaagaataattttcaaaaaggttccaatgaataattataaaataaagtttaaaagaaaaatctaatgaagaaatggtattgtttaagaattatagtttttattcttagtataaattgctttgcacagaaaagcacaaaagactatgtacgtttgtccggaaaaattacagataaaaattcagattctttgcttgttttcaagaacagaactaaaattaaaagaattaatgttaataaagacggttctttctctgacactctgagaataaaagaaggttactatggactatttgatggtaaagaacaaggtttcttttatcttaaaaatggttacaatctgaaaattacttttgataccaaacaatgggatgaaacaatgacctttaaaggtgatggtgagatacctaatacttatttatttaagaaagcactgtatactgaaaaagctactgcggataagtctatatttaaattagaaaatgcagaatttacggcaaaaatagatgaaattgtggtaggttatcaaaaacttcttgtaaatacaaaaggtttggaagcttcttttattgctcttgaaaaaaaggatctcgaagaatttaagaaaagctgcatggtcagatataacaaaactaccggattaaaaaagcatcagcaagagattcttccaaaaggaaaagtttcgccaaaattctttaattacgagaattacgacggtactaaaacttctctggatgattttaaaggtaagtttgtttatattgatttatgggcaacctggtgcggaccatgtaaaaaagaaattccttttcttaaaactgttgaaaaagaatttcatgatcaaaatatagcgtttgtgagtatttctaccgatcgcgtaaaagatcacgataaatggaaaaaaatggtgactggtcttcagttaaccggagtacaattgtttgccaatggagatacttcttttgaggctgcctacgaagtaaataatattccacgatttattttaatcgatccgcagggtaatattgtggatccaaatgctccaagaccatctgaagatcgattaaaagtagtactaaaagaagctggtgttcactagtttattttgtaaagagattacatcattttgccttctttgacatattcttttttaatcccttgaagaagatgatgaagattaatattttcgttttgatcttctaatgttcgcagacaggcatattgaataatgttcacaatattagcaccggtaatctcgtatttttttgaaatttcgctaaggtttacatcctcagcaattttgattcctttgggcaggttgttctcccaaagctgtaaacgttcacgggaagaaggcacttcgaattcaattatggattgaaatcttcgggtaaaggctgtatcaatattggttttaaaattagaggccagaataaccagtccgggatgattttctatacgttgcagcaggtacgaaacttcctgattggcatatttatcatgggcatctcttacattggttcttttcccgaaaacggcatcggcttcgtcaaaaaagagaatccagtctttatcggccgctttgtcaaaaagagaagataggtttttttcggtttcgccaatgtatttcgagatgaccatagacaagtcaattcggtagacatctctctgtgtatattttccaagaagcgaggccgtaagggtttttccggttcccggtgcaccataaaacatgactctgaaacctggtttaattgtggctttcatgttccattcgtggagcagaatctcattaaatttaagccaggtttctatttctttaatctgatttaaagtcgaagaattgagcaccagatcgttccagtctaatgtggtttcaattagctgagcagggaaaatactgcttagctgaggttttaggatttttccggtgatgaatttttcaatgtattcgtcttcaagaatcagtaaaccacttagtttaggttcgccgtttggaacagattctattttaatgattcttttttgataaagaaaggattgattgtgcaggtaattatagaaagaaatccgggtgtcaagatcatttcccgctattagaaactgagccgtttcgcctgttggtaaaataccgcggtggttctttgatttcacccctccaaattcgggtaattctcctccgttgggtaaatattctgcaataatcgaacttaaaaaatcaggtttgatatgatgcacaagagctaatgccaataagagagtatctgtttcggtgaggttattttcaatgataaattcgttgataaacccgttggaatccagttggattaaagcaggttttccggttgggttttcggcttgaaaaagtgtatcaagctgaaattgaaattgggttttaagaaactgaagtataagttccatggtctttttgttttgcctattgttattgaatttataatcgggactttatttttttaatttttaagaaaatctattagattaagagtaggaaaacagtgttcaattccctttaaaatatctttatacaagggatttttttcagtgtattcatcaataaataggttttgccatccgctaattcctccacaactatatagtttttctatgaatgtctcgaaagaaaggtttattttttgaggttcaaaagaggaagaaataatataaagactaattttttcattttcaattgagaaaacggtatctccggcctcttcaattattaaaggataaaacttactcagttttttttcaaaacttttatccgcattaatgaacttaaagtagttattatcccaaattctttcctgagcatgaagaactcctccaaaaatggtttcaattggcagcatttgaaaattggcgaagtaggtttcagatttccagctgatttccaggccatttcttcgataatgatagaaaacaaaattggagtttagtttgtcttttattgcgatttcggctcttctaatttcaatgttggagcatccaaggttttctttatatactgtaattttatgattttccggtattttaaatttagcacctccaatagagggaaatgattttgtttttgtgcctgaatcactaaagaacgattcaagtatttcaggtttcaactttgtgttgactaagtagtaaaaaaaatcgttattgtatttgataaagtgactgaaaacctcctctgagatgtaattttgccaatggtaaagtccgccagtctttattcccaaattcaagtaagattctaaagtacagtttaatgtaacttcgttaaaatcggggctcattcttatgatttcgtaattttcctttattggctttatgaaagttacaaatttgttaatgatgtcaacatcaaaagggatgtatcctttttgtatgtaggctgaatattctttaagatctgttttttccacttttgtcagataatctcgtaatgtttctaatttgggaatattaagtttaccaaagcataaaatatcaacatcagaaaaccatgatataaagagtccattcgcagttgtataaaatgataataaagagtcatttagttttaattcagcagccagttttttcaatttactgctggtcaccagaggacttagttttacagtatgagaatgatccttctttagcattaaatctgaaagttcttttatttcaagaagtatattttccatagttagaattttaatacgttagcattgaccataattgggatggtattttttatatcatttaacctggttatagtttcgggtgttctgcggcctgacggagttgatggagcacttacttcagtggttatagcatttctaaaatcagtaacattactgtatgttctacttcttatgatatccatcacggtgtcagttagaatactctcaaatgatgagctaagcagtgagtcaaccctatatttatctcttggttgaagagagttgtaggctcgcacaatttcgcttcttgtacccactccaattacaggaggattaaccgaattccagtcaggcaagtcaatatttaaaccggcatctacaaatttatttcctaattcccagcttcgattgacgtaattatactcccaggcttcaaattttatatgttgagcgtagttatctcttgtgactctgttactagcatctttaacgtctaaagatccgcctaagggagcgctaacatttgttggaaattctccgctgtaataactatctacttcagcaacaattttcactacaccttgttttgttggatcattagggcgacttccaattaaattttttacaggatcatcaaacctgttatcgtaagaagaattgtttgatgttgttcccggagttagattttcaggaactccaaatcctccaaaaccctgattgataagatggagtcttttccaatgaccggcacctctcgtcagacctccggtttgaatggcttcccagccttgtacaaatgaacctccgggctccgtaccacccgatctgtttgccgatagtaaagttacctctgccttatgcgctttgttgccttgtggctgataattatataccggatttgcaggtaaatatcgtctgagattacctctgatatgactcatcatctcactgagttctctcatttttgagtttaaattagggatgaccccactggtatttgcagcattatttgccatagttcttatttctgtagccaatctgatagcatctcttacggtactatcattttggtcgacttcatcggaatgtaaatattcaaagatatctttaggatcactatgaaccataagctgaatcgcattgtgattgtctctaaatctcagagtgtgtctgtctccatccgtctcatcaaaaggtctttctatttgtagtatctcaccttttacagcattagtttctccattcacctcttcattttcttcttcaccaactcctcttactccttttactaaaattggagtgttgtgattgttgatgtttggcatttccgcatcaatattccaattttcaccgtttcttcttgctgttaaatgagtgaaatgatgtctggttctgattgggtttaattcggctgtaatttgagcttgtgttaaaggatggttttcggatgttgtagccaaggctcgtaatgcttgtaatccatcaccccaatgtgccagaacttcgggtgttggtgggtttggcggagcatctgcacctggtggtgttccggttgttccggcattagggtttccagttgagtctgtgacctgaggagtcgcacttccttctcctccggctgctccttcctgaaattctgccgggtgctctgcatctgtagattgggcaggagggacgtggtcattcatcaaatcggtcatgaatttatcggagttaaaatcaacaggtgcaaattcaacttcaggtaattcgtcagagcctaaaacgtaatctacatcagcgccaataccaaactctcccggcaaaggatattctaattcccctaaaggccaggtccatttatcatctggcgcaggagaccaccacggactgtctagttcgacaaacagatcaccacctaatgctaagaaaggctgtgcagccatttcggcatgcccgtgtatgtaaaactctccttgtcttccggcttcaggagatgccgtttctctgtaaccaatcgttggggtggcatcaacatatcctctaattccggctaatgcattaacaccaacacctacttttatatcatgacccagtaattcaacacctaatcctccttctgctcgcagtcgcagtcctgcaaacattgacatattgaaagaggcggaaagactaaaatcattaaatactgccggatctgtagaataagttcccactgccctgatgttataaatctttgcaggacctattttcgccagagcttctaagccaatattggcaaataagaagacgttaccgaccaatggaactccatacatggtacggacctcaacagtaaaaatttctcttatataatctcgttgggcaaataattctacttctgcaggcggcgttatttctccatgaatagtgacatggccttcattatcaataataaccatagctctgcctgtcatccattcggtaaagctaaaatcgacttcaccccagcctgccatagccctggggcctggtgttggtccactgtttgcttcaggaattccgtttgtttccctcgcactttcatcaatttgagaaggatcgagctggcttaaagccgcatttctggctgttgctgcatcggtcaccagcaaagtaacctgaccacttattttttcggtttgataccctacagtacctctgatgtcaaaagttccatttaaaaaagcagcgtgaatgctaccgttaaaattggccatatttacagccaaatcaatttcgccggttatgtttccttcggcattacgctcaattgtgatttgagttggacttaggttaggaacttcaacacttccactggctctgaatgtgatagcctcaccctgaattccaaagtcaagagttgcatttacaaatcctcccaattgaacaggaattccatttgctgttaaggttagatttccgccttcaatgctgttttgcacgtttggaacacttgtaacgtcaattccaacccagccaaaagcttcgctattgtctttaatggcattaataagtccggccggatttccaactaaccgatctcctgtttttactgtaatataaccatttatagtattgttttctatttgaatggctaaaaccggggtaatatttatacttgtaagcggacttaaataactaatattaagatttatgctttgtctattgtctttggtattgtaggtaccgtctgtattttttttcattttgattacacctgatgcccattgaccaaaggttacattaacctcagcgcctctgtttcccgctgcctcaatctgagtagcaattgcttccggtggtgtaaatgttggtgtctgtaaagaaatacgttcactgctggctgatgcagtagtaaccggagttgcagcagttggcgttttctgaatcattttaggctggacggcactggcgccttgctgtaaggtgtgtgtcaattcgtgtgctaaaagatgctttccggctgttgaatttgtattgtatttgccttcgttaaagtaaatgtcatttccactcgcaaatgcctgtgaacccaattctttgttcatctgaacggcatttgaatcgttgtggacttttaccttgccaaagtcggctccgaaaccggattccatctctgttctggtgtttttagaaagcggagaaccaccacctttgctattgtttaaattactttccagattagaatcatcggaagggtttgcatcggcaccagtgctcatttgaagctctttttcgtcttctttggattggatttcttcttcctctttagtctgaacttcttcttcggctttcttttgctgaacaattggttttggaacagaactggtttcagtgtttttagttgtttcgttttgaggaacttcggttttattctgaggggtttcttctacagttgctttttcaggaacaacggtttctttttcttctttttctgattttaactgaacaacgggagagaggttttcggctattgatttttgaggagcggtttcctcctttttctgtacctcctctaatttgttttgaactatgggtgatgggctgaaaaacggttcagggttatttttagtcgttttagaaactatctgatccgcagctttgtccgcttccgcttcatatttatcatttgatttgccgatgctgagttttgcctgtacaccaaaaaaagagctgctgcctcgctcattcgttgaggtagtttgattggaggaatgagctgttttttttgcaagagcacccataattaagtcatattttaccgttttaaaatttaaaaagaactattgatctccattagaataatttctttaggtccaaccagggataccagtagcttattgtaatcagggatattaaaataacgactttgtccaattttccatcgataaggcaatatggttttttcatagaccttttcatcgatatggtttgtttcttgtgccttttgatcttttttactgaattcaccaaagctgttcaaatgataaccgaagtaggaatctcctttttcaaaaacaatgggcagaatgtaacttttagaatcttcgggaacctcccattctttggatatggtattggtttttaagtaggtttttttgttttcggtataagaaataaatacctctccattatttaaaacaccggcagactgaagtgctatttttcttttcagaacagtttcttcataccatctgaaagtagtgccttcaagggtaatatatttattgccccagaagccggcgagcttttcaaaggggccgaagtttggtgttgttttctcatttgcagcaataccttttgtatctaaagaaacaattgtacttttagaattatcgatgcaatagagcgcattctgataagaaacggtatgaataccgcccaaccattcaaggactttgacttttgtataatcaccttcaatcagccaggcattactgatcccaattacccaaatgtctttgttttctgagaggaggattttcattccttttaaaggatgctgaattttgacagtatctttttttacgatatacaggaagtcagaagttaactttagaaaatccccatttgtagtaacagccacatcaatgacatcagaatcggaatggtagttaaaagaatcattaaggatagagaaaaaatgattgtcccgtgtgccattctcagaaacatatcgaccaattaatgcctctgaagttccatacaattccatatattttccgggaaatgaaagtgcagggtttggaatgtctatacgagaatattcgtgcccgtttttaccgattgtaggatactttgataaagcaggtacggaatctatcgattgtttatagacaattttaaaagtgaggtcgtgtttgttttccggattcattttagaaacgttttgacaattggtaaatactaaaattaataataaagatagagccattttcatatttgattaaacaatttaccaaggtggattagaaatttgaattactcctgaaaatacggtaatgtcgacccgctgtataaaataattattatgaggctccgaccataaactgatgacgtgagttccgtcgattgccattgccacgtgtcctgggtaagggtcgcccgaagcagtataaaaaattaactgcccgactgttggcgtcgtacccggataggtaggcagaccgctgttccaacccaattggctccatatcaaaatatttggatctccgccggaactaaatgcattattatagaaggtctgaatccaggaagcattaattcggttagacagataagcagcatacatgatgctttcccagcaattcatagtcgcagcagccggaagtgttccggaaccgccattggttacaaaataagcgaagaaatcattgttaggagggtttctccaatacattgaccccaataaaagatgagagaaaacggcaacagaaaccggagctgtcagtcttgaattgattaagcttctgatgctggtatctgccaatgcagcttgtctgtcgccgggagaggcatttaagatttcatttctaatggcatcataatcagtactgtgattgagaagccaggtaagttttggaatgaaatctgaaccttcataattaatccattctaattgtgttacaatgtcaaaattgagatcggttacagcttcgaccatggttatgttatcacaaatcgtgctaaaaaaatctttccagagaggcgtttttaaagcgtctttttgtgcctggtctgtactggaatgtatgacccatggttttatagtagcataatcgagttcgaatctcgtcatgaacatttcggcgttcagccaggtcaatttagtagctaaatcaaactgcagatcgtttaacgcctcaattatagtaatattgtcgcaaacgtctacaaagaaattcatacccacatcggtatgcacttttagggcatctctttcggtttggttagtcgtggtgcttgtaatccagggttttatgtttgaatagttgattgaccaagtggcagaaaagacttcggctttaagccatactaattttgttattaaatcaaattgtaaatcgtcaagagcttcaatcatattggcatcagtacaaacgtcaacaaaaaagtttttccagacatcggtttttaaaacatctctttgcgtttgatcggcagcggttaccattcctttaatttcactgtagtccatgaaaaatgttccaaaggtagcggcggcatttacccattccagttttgtattcagaggagctcccaaattattaactgctctgatcatttgggctacatcaagtgctgcagccattctggttttgtaactgctattgcctaaaatagttgctttttcagtatcgttaagctgagaacacattgtaatgacttcatcttcgggaacattaaaactgtcgagcatttcgtttagactgtctaaattgcttgaaggattctgtttttgaatgttgggtttattgccttgctgtatcgtgtgcgtaagttcgtgtgctaacagatgttttccgtcctgcgaatcgggattgtattttccttcgttaaaatagacgtcattaccattggcaaaagcctgagagcctaattctttgttcatttgaacagcattagaatcattgtggattctcactttgctgaaattagtcccaaaaccggattccatttgttcctgagtggtattggtcatgggagaaccaccgcctttactgctccgaagtttgctttccagcgatgccgtatttgttggacttgtttcagtttcggcacttttttgaatttcctgttcctcttctttggtctgaacttcctcttcggtttttttctgctgaatcagtggttttgaaatcgggtttttttcgactggcttaggagttccggctacaacagtttcagttttgttttgaagtgtttcttcctgttccgtttttaattgcgtaacaggggtactctgttctgctaaagattttttttgaactacagaagatggactaaaaaaagattccgatttggcattttgtttttgagaaacgatttgatctgctgctttgtcggcttccacttcatatttgtcattcgattttccgatactgagcttggtctgtacgccaaaaaaatcctcaccctgccttgaattaaaggcggatggtccggaaggactggattttgatttttggttaaaggctcccatgtatcgttaacggtacttgattttattaatgtctgtgttttgatcccacacctttaaaagcattctctccacaggaagcaggagttccaatgatcatgctgaacttgcctgctgttggggcggtgaaattaattggaacggtaccaccaattttgaacgaggttggtcccattaaacttttccctgtggaatcaataatttcgacgctgtaacccgaacaggggttctcgtttttatttcttgtggttgttaatgagattgaaaatgatttacaatcaccatttgtttctaatgtttcaatatgaaccggatctgaggagaaatgaaatatattcgttatatcgcaggtctttttgtcttttttctttggtggttttttctttttgtctttgcctggacctgagccttttccaacataaatatcatctaaacgaccaattgtttgtacgccaacaacaccatcgtagctcagaccattatcagattggaatttgaatacagcagctcgtgtttcactgccaaaatcaccatcagcaccgaatttaggaagctgataacctaaatccattaaacccgattgtactttttctacaggctcgcccttacttccggtagcgagataatctaaatcatcgtgcgtttgctctaatttgtaatctcctttaaaacgaggagattctaaatcttcagctgcagttgcagaaggatcgacggatttttgtacggctccggtttgctgaatggtatgggttaattcatgtgccagcaaatgtttcccttcgcgagaatccggattgtattttcctttgttaaaatagacatcgttgccattggtaaaagcttgtgctcctaattcctgactcatttggacagcattcgtatcagtgtgaatttttacatcgctgaaatccgcaccaaaacccgattccatttcttttctggtttttttgtctaagccgtttcctccaccttttgagtggtccagttttccttcgagttcattattctcaatttcggcatcgggattttgctctttcttttgtaaggccttgtcttcttctttttgatctttagactgtactttttcttctttttcacaatcagcacatttcttttgtaccggtttctcttcttccttcttatccgattttttctgtaccggcttttcctcttcttttttatctgattttttttgtaccggtttttcttcttcttttttgtcggattttttctgaacaggtttttcctcttctttcttatcggattttttctgtacaggttcctcttgtttgatttccttactctgaacagaagagatggtctctgcaattggtttttgctgtacgttttctttcgactgcagaagacttcctccggacgaattattattcactactttatcggcaacccggtctgcctcaacttcaaactggtcaccgactgttccggttttcagttttttctggattttaggtccaaaaaaagcggaagaggaggattgagcaattggctttttattttctagcgttctcatcacttcattgttttattatttgaaataaaaaaatatttctttaccctttacgggatcaattttccggaataaagggtgctacgatgcgagcatcgttggagagctggtttcttcttttggtatgatctgatgtttttcgagttcgatctttatttgtgcgtaccagtatggaaatattttaaacaatcgatattcaatttcttccgtaatgtcttttttgtactttttaataccaaagagatgactgtagcttatttcactggcatatttactctgttcggttatattttttcctttaagaagcagggtaggcgtaatattgttatagtctaatacagaagccagattgtattgttctatgacaatacagggctcaaaaccttgttgctttaatggttcaaattccttacggttggtgatatagattttttccagatcataataggcatttataaatttatcgcgcagtgtaaggtcattaaaccccagtatgccacagctgtaggaaagtcctaaatcaggatgccagtaaggtaaattttgcgtgtattggttaaaaaaatcgatttgttttttatagtgcgcttcataaccgcattctttgcgttcgagaataatggagtcgaaattgaaattgattttcttttttataaacacatccgtatcgaggtgaacaaaaggtttggtctgcttttcgatggcatgaatttttgatttcatccacaattctttattgtgttccttatccatttttgtgattctgcagggcagcatatacaaaaaattataggcagtttcgtctgcataaagctcaatgtccttgtaccaaagatgactgtacaaaatactcagagcggtcatgtaaacggtttccttaagtttattgcccatctgccaacgattattgatcagaggaaaagcgttcaggctgtatattattcttggttcttccataaaatatcgcttaaggtttgcagctgttgtttttcatccagatagcagacgttgttgtataacgaagcttttttactgtgtttatagagtcttttccattcgtatttttcacccgttgcttctgaggtcaatttcggaatctggtcattatgaaatgttttcatttcatcaaaggtggcgtgccataccattttacctaataaataggactgggttaagcctattttagagaaatctcttttgtaataatctgtatggacatttttatcgttgatctggtattctgaaaccaaaacttccccctccagatcataaaagcggttgaaaaaacgggtgatcacttcattttctttaatgagggataaatcgtcttcattttcataaataatatcaatatcatttataggcatatcgtaataagcacggaggttaatgtaatccgcaattccgcctacaaaggcaatctttgtgatatcgaggttttcaaaaatatttttgagagcttgtttttgctcgtagaaaatattttgttcatcttcttttagaaatgtgtttttttcggtttccatgttttatatcgtattaccagtccacaaaaatgatcttgtctttccatgcgagttttacaattcccagattccagctaattttatctaataaaatgtcctgtgtttttctttcgacaatgactttggggttgtcttggctaagaattattttaccgggtctttgtaaatactcattttgtaatagggctatagaagaatttttcataatcggccagttgtctaaaacggcttgcagcatttctttgccttgatcttttaactcttccgagagtataatgtttcggtttataggtcggtttatggggatgttgcacaacattttttcgaacagcatttgagattcgtaatcctgctcccgatctgtcgcgatatagtgtagcagatgggcggcagtttcgggatcgtttatcgtatggtctttatggagtaaaccgcaattcccgaaaagatgtttcaaaaaaggatgcaccagtattagtcccgcattgtttacatagtgtgaagaaggaacatccgaagttgctccgtcagcagggaataatgccgaatgccagtcttccagatctttagtttcttcatttttactttcgatttccttactacgattcaaaagagtattgatctctgccgtttctgcatcatcggtttccggggattttgaagaaggatttcgattttcttcggttttcttctttttatcaggatcaacaactttatgaattttttccttttccttatttccagattctaaatcttgagcttccctattttgagcctccattttagtatcaggttgaggtttgttagcaacttcaggagatctgtcagtttctgaaaattttaattttaagaattcttctttatcgctttccggaagaacgtcggaagcgatttgttcagaaagagcttttatattggttatttcgggagcaagattgcttagtacggagagtactgatttatcggatacattttgcctgatttgttctaatatgattttcaggttttcctgagttatagaaacaaaagaagcaatcagctgcactaatttttcttttgtcagagtttcatcatgctgtaacaattccgaaaagactatttcccaaattagattgcgctgatttatgccctgtttcgatttcgaaacaagtttgcgcatattgcgatggatcttttcaattattttggtagctgtttctttatcatcggcggtcaaaagaagtgtttttttaaggatatcataaatctgtgcgtctgataattgtttgatgaaacgggttctgatttgggagtttttcaatgcatttcgcaattttgaaccgaaagttttgtctccaatatttttttgtaattgaggatcctcttccggaccagggggagtattactcttacgattgccgttaccgtagttattgtcgctggtaatcacccaccagggactggttcctgtttccagaaaaataaagaattcatcactgtttttttcttcgcggtttattaatttgtaacgctgcgtatcgggaaaacctttttgaatctgatcttcaatctgtttttgaagttgatttaaaatttccagttttaaggcattaaaattaagttcaggagcaacagaaaggtctaggtctaatttttcgatctgaatactgtacagtggtatttgagtatggagcgtatcaaaataggcttctaaaagaggaaggagttcttcttttagaaacgtatccagatgatctttgaggtaatacgccttctctttagattgggtattgacctctagaaacagcttgttgatgatatggctcccaaggtgttgcatttagtttaaactttttagttgtgattcaatggcttccagaataaatttgatgtccttaaacggaatcttctgatcggttaagaaactttttaaggttcctttaggatcggtcttatactgattttttacaaaaccttgtaacaagctgtctatacgtgccgtaatggttgtaaagggtttttcgaatttatttaggagttctgcgggctggcattttatgatggtatagaaaagcgagatatgactttcggtaaggaaactcagtactgttttttcctcttccattcttgcattttttgaacccagtaataaattgtggtatacaagttcattgtacatctcgggtaatgcagtattaaaatctccattgatataagcactggtttctttttcaacacttgcaaattgtttttgaatttcagtaatcagcgaaagagtctctttactaaatttttgtaattcaggctgctggttgattttttcaaaagtcaggttcgtttttttgacgaattctactgcattagtcagacagggattttcagtcggtttttcgcgaattcggatatctctcggaccgtctattgattcgccgcatcttttgttgagtgcagaaagcgatactttgatcacgtcgtttttgtatagcgaagttggtcgtatgatggcttctgtagcatcggtttcgattatctcttcttcaatgttccagatgtattttagagcatccgtggatttgttgctaaaggcaatctgattatttctgattgcatggctaaacaaagctacaggtggattctgcattataatagtaaggttcgaaggtttaccgtttattagtataaccacctgatcgacatctttaggaacattattgccgataaaaatgtactgaccggcatcattttgggagactcccgggcctgataagacggttttcttgctattcggttcaatggttaaaacatgtggtttgagatcatttttacagatgtttttagtatcgatgcttactactacaggcacttcaaaagtcaccggatgctgtgcctgagcattacagtttccgttttcacctgtaacttttacctgaaaactatagctttctttagcgggtacttcatagacataaatatgttgaatttttgcttcagtagtggcaacaggctcactgccatcaccaaaatcccaaacatatttcatgtctttctgattctcaccgctaatactaaaatcaaccacaaccccatccttatgaagcgatttcgggaagacaaaggtgaaatcaaattttggttttctgaaaatggttatttgacagttggtttcaaaattattgactgtaaaagttatcggttttccgatgagttcttcactgaccaattttggatcaaaaacaaattctccatactgatttttggtcactccgccattcaaatcttcgtctacatcggcttttacaaaacctccggttggtgttacgtgaaaggggaagtaaggtgttgtttcatcaaagcagatatgattcataggtaaggacagcgtgatgaaattatcatcgcagcataaatacggcaaggtaaaatcggctattacgggatttatcacgatagattctccgggttcttttttatcgccttctttttcaaaatcgcctgcgagtgaatttccacgcggatattcgtacggataaccatagccgtaataataaggatattgactgtactctccttcgatatagatcatgacaaatgtgcctccgggtgccacaccggatttgtgctcgtatccgtgatttttgttcagatagtaggaggtataattttcaactatttttttcgcgtcataggcttttactccaagtacaacaacattgaatcctaaaccgtactgacgtctgatggcctgaatcgtttttagtgcttttttgtagtctgtaccctgatgcccttcgattctgtagaagttgtgatctgagaccatttcgttaggccattttgtattcaataagttatcgtgataacttctgttattgcgctgttgtccgatagtggttttttcgtaatcccaaagttcaataagatgatcgcccacgttattgtaaaatggaattgcttttttaccaagcgaacccaattcaaaactaggagtgatttttatataagtatagtttacattgtagttcgctaataattgtacgcagcgttttatcagactgtacaattgctgcaaatctgtattttttccataacagattgtaatttctttaccttctaaatcgacaataaattcgttaatggtgtctttcttcccgggttcgttaagtgtgtcaaaagggagacaatcgttacaggtgctaaggttttgtcccgtgagcaatggtgatttgtaaaaagaatgtcggtattcaaaacaaggaccacttttctgcacttctcccagcattaagtgtttggggaatgatttgatgtccggaaagcaaaaatcatagtccatatttgataataaaagtctgatctcattgtaagtatcaattaaatcgttgagcagatcgtatcggtactgaaaatcaggtgggacatttttttcatcaaaactgtacagagaagccagattcttttttatagaatccaatatagttggcatttttaaaggggtcaataggatctcaaaaccgtcttgcagtctgaccactacattgtttctgaacagaccattggtgaattttcttttgatttcataataactgctaaaatcttcgggctgtaatacaatgcggttagagaccagttccggaagtttgtaatacaggttagagaatttgattttgctaatgattttatcatgagtgtttatctgcgccgcaacggttttgcttaccaataaggctttgtgattgccaatgatttccagtccctgattgtcgcaggaaagactgacacagagatcggaatctttttcatacgattcgatatacaaaagaacgacagcatccgttacctctaatccggtattttttttaagataatgtatcggataagtattggcactttcgataagctgctgttcggcagttaaaagttcgaagatctcaagctgttttgaaccatcgtaaaaataaggtttgtaagccgcttttttgttgtcgtatactttataatgcgtgtattgtttactttcaaaatcaataatttttccgccgtttggagtagacttgtacaactgtataagatcaccgtcggttgtgataccgctgccttgtgttatggtaatgtcttttgaaacggggctgtacgaaaccttaaatccgcaaatgatgccgacaccactaagaccaattctggaaatacgatcctgatcatcaaaataatctacaatctcgttaagatgtccttctgttagtacctgatttttagtgaatcttcggtacagcgttgttatggttgaaagttttactaacattttgaatggtatttatagtgatcctaaatttgtttttcccagtattattttctcgaattgattttcgttttcgtcgttgcagtcaaataatcttcctgtaggatataaattgctgaggttcgatagagaggtgataagctttatgagatctgtctccggctgatcctgattcaataaggttttggcaaataaataatccttgtaagagttctcaaaccgcaaaagttcgttttctgccggattttgaatttcatttttccgatgtccgatccagcagatttttgccagcacatgcgccggtaattcttccttaattactttttcgatataatttctgaaatcgatgttggcaaaacgcaaagtatatccgggcagaataatactgacgcgataggagtaagggtcgagaggttcacagctcttacactcatcggtgcagaccggtaaaaatgttgccagatttacaatagtctggttcacatccgggcgaagcatcatgtgttctacaataaacaaaccttcttctgtaaacacttctttcataaaatgaatcaaatcgagaatagactgttttactttagccaaagaactgtagtaagtgtaccttttggcaatgatacggtccttattgttcacatccgtaattaacggattaatgatgtcatacgaatactttccggaaggcgaccggtgtatctggatgttatcgatgacctgcggatctgtgattccttttttaaaagcctcttcgacattgtattcgcgggtttgaatgatttgtaaaatagcaaaatacatttcccgattggcgaccgaagtgtcgtaatactctgttgtggccgagagtacgattttgtttttatcatccctgattctccatcggtataccagttgattgtcggaatcaataaaatgatagagatctacaaaggaatccgaaagatgccttctgttgtagtttttaatccccaaaagccttgcaattctcttttttacccccgagacattatcagtatcccagagattgctgttgggctgtcggtaatagttaaaagagctgccgcggtttttgcttacgattttataatctttcaaaaagtcttctttgtttttcagcaccacctcatccgtagcactgccatagatacttttgttaatgaaaacatactcagagaaacgttctgcaaaccgccctaaaagatggtccagaatagaatttcgtctttcaatattgttgtccagctctttaaaaagaatttcggtcagataatcatcattgttttcaggatagtcctccaccagttcgctaaagcctttaatgtctttcaccgcctgagtaaaaaatgttttagtgagattgccgcttaccgaaagtatttcattaacctttcccaaatgtttaaaataactggccagaatctgatcaaagaataatagataggctttaagctgtttggcctgcgattgtcgggccactgtggctcctgacggtaaaccgacttctccgattccgtacgtatccggaaaatcgttctgtatggtggtataactgtttgggtttaaataagtgccttttggtattttcagttctttgtgtttgctggaataatcggtagctttatcttttacgtcattaattcccttcagataaagatctacctgggttttattgatgttcagaggcagtacgcctttattgtagttgaaaacacttttattacagattaccggtttttggtattctttgaggcaaagcagccactgattggccaccgcttcatcatcgccgcaattccctagagaaatatctttgatggtcagcactccgggcacattcatgatcagtttgataatatccgataatcgcacctcactggtcagttcggcttcgattaattctttggtatcaataaaaccgtgttccaaaaccggcccgtcaaaaatttctaaggaagtgtaccccttatcaagcatttgcttaaccgaataaaaattaacggtggttgataaataaccgtctaatgcggttaacaccagggcatgaaccatttcttcgtcggcctgagtatcgatctcaatactggcacatatttttataggatattcatcgacttttataatgttgatcaggtcttcacacagatttctgttggcatgaaatttttgtctgattttgtctttgacactattaatttcagagagtttattgctctcgaaatcgacataaagatcgtataagcctttgagctgaaattgctttttaaggcggcttgggacttcgctaaaatcctgataattataggatagcagttcgtctttgcaattcacgtaaacggttttgtagtgctttgccggccagcagtttttaacgccgtcgatatcgataaacagttttctgtaatccagtgcagtaaccggacttgtagtcaatacttcggaagccttaaaaaactggttgggaatatctttttcttttacgtcagaagcaaggaggttttcgattggcaaatcggttcgcataccgagatcggttatcgcataacaaagcatctccagcatcgtgataccgggatcatgcgaattaaaatcagtccataatttgccacccagttgttcgatatactcaatgcctttttttctgagatagaaaaaatccaagtcatcttcggtcgcaacctttttaggaattgtattatgtggatttagtattgacatgactcttcggattgaaaattaggtgttgtacaactgttgatttttgtagaaatgatatgattttttaccgacaccagtatgcgttttgggttagacggtgacagtaccggcaagaaatccagtgttgcctgataagtaatatcgttcggattttctgattcggtattgtctttgagtttcgccatttctaactctgctaaataatctacatagtataatttttcgatatagtcaatgatcgtactccggtgtaattcaatcccaaaaaggatgtcctgagtggtgtcaaatgcccacggcgacaaaaatttggtgatatcttcattgagctgttttttataaaagttttcatcgtattgagcataaaaccgcacattgagtttgatgatcaccttctcgtattccggattaattacagcgacttcgacatgcatactgttgagattgctgatgtaatttcgaatcttatttaaggtagccgtatttactcttggttcataaaggtcaaatacatttttgtttataatatccgggaccactataagagtaatatctccgggagaaagaaaggattccttttcattattggtatggttcaggcattttactctgaaaacttccggaaactcctgaaggataagatgctcataatcccatagcgttatcgctctgtttttgtggcgaagacgttcacttacccgtttgtaataggtctcgtctgattcctgtgcttttccgttaaaagaattaaaaggctgtgcgacacttttcacctgtgtgatgcgggtaatgagtttagaaatcgtttcagcgggcaatcctttttctaaatgagacaattcgttattgtggttgtaaaattcggctgtaaccacttgtgttttaatatcgattattttgcagacggcatcataagctttatgcatttttgctcttacccagatcaggttgtccggaaataaagtatttgttttggtagcctgttttggaatcgcaaatttcagtatccccgactttaaaaaattatcggtagaattggctaaaatttcattctcgatatttttccattgattgttacaaagaacaaaccattctattttttgtctccccacgaaagagtctacctgtggattttcgcttccttcaagtatctgcaccaataaagcaacctgctgtaaagtttcggcttcctcaagaccgatgtaaaattcgcctcctttgcaataatcaggaacgagacggcttgtaagagcgctattagcatccaaaacccctttctgtctggcaacattttttaaataagaatgttcttcactctgtccaaatggagcttcatgaaataatcggattcgttctgactgatattcgacttcggtttgatgggtaaaattgaccgtttcctccgccgtataatctaaactaatggtttcgacaaatggcgtataagcttcattcggaatcagggtatccgcaattttactcataacagcgagtgtatatattttggggtacaaagagtgcagcaacgattggtttagcgtcaatcggatcgggccgcttttgtcaatgtcgtaaccgtctcctgctaaaggaaattcggttacataaaccccgtcttttagcgtaaacaaagtagtgtctgtaattttagtttcccagttttctttatttaagagagatacattacctttaaaataagcatcggagtctacaataagatcggtgtcgacggtgttaagaatcaaattacttttttttggaatatttatggcgacagcatctgctttaggctcagggtcttccggctgatttacggctttgtcttttataatttcttccagaaacattccgttaaagaaaagagtctggcttattgtggtatcctgatatttctttttgtaggcctgatagtgcgttttaaaagatttgggggtgtttttccattttatagagacgttgatattcttccattttttggaaaacatttccggataatcaataagaaatgaggaaccgctggtaggctgtgtggtaaaaggatagaaaggcttttcggcatttagtaaaccggtatcgctttcgagtaatagtgattttacatcttttacgtctactttaacaccaatgctgctgacggttttggtcaccagatttctaaacaaataatgtccttttttgtcttctgtacgaattaaaaatcggataacaggttctgtagtagagaaatgttctcctaatttcttttgattatagtttacaacagagggggtatcttttgaaatttgaaacaccaatcgcaattgctttcccgcaatacctgaagtagcagctgttcctataagtttaaaaggaccaagccatgctttttcaccactgcagaaaatgctgatattatcaacaagatcattgacggtaatgggttctttgaacggttcggtatcaaaagtaaaagcctcattgaaggtaacggtaatatcgatatttctttcgccttcttttagttgcaataagggtgaagcgatggtaaagccaagtctggcagcttccagttcagtatatttttcttcatcagaagtatatccaaacggcagccagtacttggatccttccttaagactttctccctttccatcaagagagttggccacctggctgcattttatctcccctagcgtgatatcattataaacactcttaagcgccgtaatttgagctttgttggcaactaattcttcggttgttttatagataagtttgttgcctaaagcatcttttccggcatccaattgcgtttgtgcttcgattcgttcttcggtactttttttagccagctcgaaaataacatgtacctgatccggttttgcagcgagtttttcgatttgtaaaatatccttgtaaaagaaatcgagatgttttttggtaattttattaaagcgctctttagacagttccaataatttcaggaaacagataaaaagggtcatgtgaggcgttaacgtgccttcgaattcaatatcccgaagtgtttccgaaatactttctttcagaagcgtataatctttgtcttttctgtttggaatgtcttttttcgaatagccaaaatgatcaaaaatttcctgccagtttccggaagcttttttgctgttgttggtgtcaaaaaagttaacctgtttggcaaaattataggtaaaaagaaaccagtcttccctatcaaagtcatggagctccaaattgtggggatcgagaatactattcacgcggtcgccctgatcggtgccatttcttttaaataaggtatcgttggtatggtcgctgttgttacacataatgctttttatatcaattttacttatattttagtccaatgcaattggactatattgaatatacaatcggtattaaatattagttccttcttgtttgtagaaaggatataccatattagttctggaattggttgctctgattctgtaatctaaagccactaacaattcgccatttaaatcatctccctgactgatgtcgattttctccacatcaattcgcggttcatggtataaaatggcggttctgatgagttcagacacatacgtttttaaggttgtggttaacggttcaaaaagaagttcgtctacattacagccgtatttagggaccataatacgttctcctattttggttgacaatagaatctccagactgcttttaatgtcttcttcatcagaaatcattacagtagctctggttgttttcttaaattcgggaggaaaactccatccggttcctaaaaaagcttgatctgtttccataattaaccaattaaaacggttgctaatccggctactattgtgcctccatgtgcggtggaatcccccatacgtgctgcgggttttcctccaattaaaacggttgccgaacctgcggcgatggtatcaggaggtcctgtgcaggtagccatatctccaacacatgcggctggaactccgccaattaatacggttggcgaaccggcaggtaaaattggtcctcccacatggggaacggttccggtaaccattgggcaaacgtgcatatctgtaattctggcggctggtgctcccataattttttatatttcagttcaatattttttatattattgagtacaattggtattgacttaaccttcgttgagtgtaattcattttaacacatagtaacataggtgttgcatcctaaaaaaggcgtttcactttatttaaatacacataaccttttatgtgaaagaaataagtttcttttctgctctctttttgcacttaaaaatctatgtttctatgtgttaaaactttttttttaaaattatctccaacagattaatttatttgtacgatacttccttttacaatagccactgcgcttgaggacatttcagctcccgcacttccttcggctttaaactgcgctttggcttttaaggatacgttggttccttcaattttaacgtcacctgatgcgactatctcaatgtttccggcgctttccatttttataccattactgtctatggtaatgacattcgaattttcatcttcaataacgataacacctttatcttcgtcgagtgttatttttttacccgccggagtttcaattcctatcgattttttctcgtcgtcaaacatgaccttcatttcacttcgggttacgatccctttttggtgattatcgtctgaagctgttataggagcaggctttccactactgtgaagcatgcccaaaacaatggcattgtttggatcttcgttgacaaaaccaataattacttcatcttctatttcgggtctgaaaaaaatgcctctgttttctcctgcatcgggcgaagcaacacggcaccaaataccctgttcttcattgttgatgatgggaattttgaccagaatgcggtcttcaccattagggtcgccttccagttgtgtgacgattccggcgtgaagtcctcttatggccggcatgattccggaacctgttggcgtgtgaatgtcataggtttcagagaaccactccggatttaatccgaattgggcatcgatggtccagtttccctctgttagttcgtgaaaaactccagtgatgtaagcgcttccgttgaatcggtcaccaacgccttccagtgtaatgatggtgttgggctttacggcagggattccttgaaatttgactcttccacgaactttggataattgctgaaacagtaatttggcgtcggcccaatcctgcaattctgtttcagtaatggtacctccgtgacgcagttccagattttccagttcgatagtttcagacaaatcagaagccgataaatttccattgagacttacaccaggatcattggcttcgatttccactaattcctgattggtgtaatcccaactgtacgaagacactttggcaaattgatttcgggcatcaatttcggcatcaaaatcaagcaaagttgctccgaaagtaatggtttcaacagctgctgaactcagatcgggtttgctgatggtgatttttccgttctctacaaaacaaagttttccgttagcctgtgctcttgaaacgataaaatcccagtcggaagtattgtactgaaccagttctttatgactaaaattagtagcttcaacgtctttttccagtccgtatgtacctataatttcctcaaaagcatcactgtcttttacatcataaaaatacttgctctttctgccgatcgttagttttaccgcttcgtctttacattcaataatgagcaaagaagcaccgctttttattttgatagaatgtttgatgatgactcctttgtaaatggcctcctcatcattgtgataaccggcattgatttcaatttttttccccggaatcaataaatcctcattactcagtttaaaatctctttcagaagcttctccgtctgtgagaacaatttgagccataggaatccggttcacctcattttgcactacaatactttttacctgataggttttagacaattcttccccttcaattaaaattttgtacgttactaaatcggcactctgactggtttgtatgactccgctgttgttcatcaggattgtttttgtaagggtgggaaaaatagtttttgcccggtttttaattttctgaaattgataatgttattgacttttgcaacttcgagataatacttagaatcaccgtaaatatgataggtcatcaagggtaaagtatcgccttcttttacaattctgtaatgcgttaaatccggcgatttattattttctctggctgctctgaggttgtcttccacaaaaccctgaaatttcgcttttgcgatagctctgatcggagttccgtccggattaaagagtttgaattctatttccatttcggttagagcccctttaaaaagcaaggttccccatgaaatcatgagatagttgggtttgtgttcgtcaccgttgtaatccagaatgacctttttaaatttctcaatgtcgtctataataccattactcgaacttttgtagccgctaatcactcccgatcggtcgaaaacaaaatcaagttccagattctccggtagttttttgttgaacttgggagataccgtactcgttccggaggcctgagtgtcatcagtctcaattttatagtgataggtatatttctccggattcataagcgtagaaaacttaccatcggcaattttgttattaaactgcgggtcactataagcaacgattttcagtttttctaattctccagccatgattaacgttcttttttacgttcgataattttcattacctgatctacgcattctgcaacgggctcttctcctttacttttcggagaatttggagaagcagccggttttgatccttcactcacatttattttaatgtgaagctcttttatttctattggcataactaacttttcattaaggtgaaataattataagtaagctcaatgttttcgacgacgagcttgctttcttcggcattaaagtcttccaccgaccattttacagggtaggcgtgaaccacattccaggaaaccaaaggctgatgctcctggttcagtagtttgaccgtcaggtttacgggttcaaaagaaaaattttcaatagcttttctgcaccagtcaatgacatcagaatcaatcaatattcctctctttaaagtcaggtttggatattttgtctttaccgggagtttgtgtttgaatctgttttctccaccctcggcaatttcttctgtctcgatatcaacagacaagccggaaaccgattggaactgatggtctttttctttcgtaccaagaccttgaaattctactaaaaagtgaaaaccgacaggtggataataattagccatgattagtcattttgaatcgataaaccttcgtgaaccaattccatagattcaatagcgacttcgtttccgtcggcttttaaatcagtggattgaattttggtaggccatgcattttttactttccaggtgattacaggattgtgttcttcgtccagtaatttgatggtaatatcccttctttctatggtatttaattttaccgtattccaccaggcataatactcattatcacttttaaaagttcctcttttcagtgtgatgttggagaatttctgcatgcctggcattttgatcttgctgtactcgggacttgctccctgacggtattcaataacctcagtttcgacatctaatcccgaaacttctgtaaatcctatttttgttccaccccagtcaactgagaaatgaaactttgatagcggataactcatgatctatgttttttaatgttagtgttttattgtacatgttatatttttaaaactgtcctgagacttttggaataatgccgatatagcatgaaaataggcaatttttattgggctatattgaatgcataatcggtattaattaagattcctgcattttgtgagagaagcgaagtatgataaattccgccggacgaactactgccattccaatttcgacaattaatcggccttcgagaatgtctatagccgacatggtttgccccagtccgattctgacataaaaagcctgttccggtttagctcctgccaatgctccggctctccattgcagaatcaggaaattttctatcatggctcgcacgcgtatccaggtgttggcatcgttaggttcaaatacaaattgctcggtcgcttttttgatggattcttcggccatattaaagaaacgtctcaccggtacataacgccattcgttatcgtttccggctaatgttcgggagccccaaaccaacgttcctttaccagtgaaacttctgatggcattgatcgatttaccggcaaccgtatcaacatttaaaccgtcctgaatattgttggtaattttaacggtaggttttatgacatagttcagacttacattggctggcgctttccaaacccctctgtctttgtcgactctggcatagactcctgcaatagccgaactaggaggaagtgttataggaaggttgtaaatttcggtaaggattttattgtaagtagcgttgtcaattgcttccagagcacttaattttcttccgtttaattctccattatttaaatcttttccgctaaccgatttaatagcattcaaaagcgcggtaagggcggcggcaatgcctgagaaattattgactagtccgctgattccggtttgagcattcagtggagtataggttaccagtttttttatttctgtgtcaaaatttaaagtgtcggttagtagaatttttttcagtttaggatctgtgttttcatcctgtatttttttctttaacgcttttaaatttttatagacagcatcgattttacccggagccgtaaatattaaattgaaagtattcagggttgaggtgatggtgtttgcaattcccggatcttcgtctgagatggtactgatggcagcattggcttcatcgtttaacgaactctttaatatggataaagtttccaaagtagtcagtaaagggttcagtttatttaagaaagccgtttttttggcagggctgctcgcgaaggttccgcctaaatcaaaaccggtggcattattactatacatctgcaacaacagatcactaatctgtccggcaatatcgccggctactggttcgtttaccaatttggttaccgtagcagctattccggttgcggggtcttcaataggtactaatcccacagcaatttgatcgtaggcttttgccgtataagaatagtgttttaagacaattttacttgcatcaaaagcataatcaagtatggtttctaaatgtggataataagctgctccgtatttaatagtatctttttcagaactcactttatttcttaaatcgtctatatttgcatctgtagggcttgattcatcataattaagtgtatcaatcagtgtaaatctgtcctgaagattttggcattgggtcagcgcatcgttgtacaatccgtagtaatccgtaatcgtgattcctgatacttttgtggcgtcgggaaacaataacaaagtcggttcatctactttttctatttctgctaatccgctttttagtgcattactgttgttgatcgcagtaacagcagaatctgcatcgtctaaatcattgccataacggcctactgaaacaatgtagcaaggaccaccgccatttgcaaaaaacaattgcagcgaataatacatcaaaaagggctgctttgaagtaggctgatctacaataatagatctaacatcaccattatccgtagaaacatcattgatggtaacactaatggttgtttccggttttgcaagaccaaaaaaacgttcgtactctaagagagaggttattcgggtgggctttaatttcaaatctccattaatcttgtttgtagctttttcagtatagccaataaaagcgggaattgctgtttctacctgggcaacagaaggaggaaattttacgatttcctcaacatataccccgggtgttttgtaagttgttgccatgattaattgtttttaattattaaataaatatttcagaatagtaatcaccattgtcttttgttattgcttttacagatggattaggatagctgctgctcacgggttgcggtacgtcaaaatcggttagcgggtcaatttcaacaaagccggaacgtgttaagggttttgttgtattggtttcaatttcggaggcagctttgcggttgatgtatttccaaagcgtttttcgattgtcaaaatggattttgaaatttggactgtttattttaccatcatcgtctatactattttcaggactattatcgccttgcagcgtcagtgaaataatcccaaacaggtcttgtgtttctgatgaatgtagtgttgaaattagatcagttgtggtttcttcagatactaaatatgcacttgatattaacttgttgtcattaattttaggcaggtatttgaagctaaccggttctttaggaggtttcacattactgaacagaaagacccggttaggcgtaaattctaaattggtgtaattttcaaattgatagtcatggatagtgattagaaagttcaggttcaaatcggcaggaactttgataaacggatctgtttcgtcatcttctttgactttaatataaatcttgaaacctgttttattttctttgaacaccattttatagttttggagtatagtgtgggtctccagagttggtgtgatcgtggtgaaaacagcagtgttgaacttttgaagcatcttttctttatcgtcattcgacatacttgcaaaggtttcttcaccattattcaggaaataattatgcaaaatggttacctccaataacaatccgtatgtgatactataactcatgattgttttcttgttttcgttatacccttaattctgctgataagtggtccttcactttgagcaatattgcgttcaatttgtatcatgctcaccttgtacaaagccgatggaagctgtttgccgcccagagttccccagatatagttcaattcttcaaaagtgggggtgtaaagctcaacggtaaatctgaagttgtcgatattggccatggccacattatttcggttgtaaatagtatcagactgtgtaaaaagttttttcccctgaaaaaaagtaatgattttcgaaatatcatttaaagagttgatgtatatggttctgttggcgctaaagagcaggtacagatttaagttgatgacactgtttttatagatcgttttattgccttgaacaatgtgattgggaaagtttttcaaagtcgcttcttcatccagattgataagagtaagtgctaccttatcttccagatttccggataccgtttcattttgtgactccagaaaagcaatgttttcaggcacaaccgttttttctaacccaatttcatcgaggtagttgttgacttgttctgtaataatctgaataacttcaaaaatcatctggtgaaaaattttaatattctgatattctttaagaaaaggcaattcaaatctctgccttttttaaagcagtgggtgtattttaggcttgtttttgtgatattccgcttgtagtaatacgatgtaattaggctaaaaagaagtagctctaaggcgcagatttaaaaataaaaagaagtatttccaggcttaaatttggatttgtaataaaaacgtgggctgatagaatatctaaattagaaaaacttagggatatcaggacagcgtaaaaatacccttttttaaacaatcttatagtttgtaaaatattaattttcagttacttaagtgttaattgatgtttttgctttatatttttagaaaaaaataacgtcagaatttccgcataacatcaaaattctaatacggaaaagcgtaaaatggtcatttttttaggtctatttaattgttatacaggtcagtatatttttattcgtcaattgtcgagtcattttttgtctaaaaaaaagaaaagggcgataataaagagaccaacctttgttctaaatgtgaaaactgatctcatgctgttatttgggtttcttatggataaaaattcggcactcatgccttttttttaatttgtgttttggcagactggtaattttataaagaaatacaaatcaggagatcactttaaaagaataccagagaagagatctgctgtccaaaacaaacaagactcctaatttagaaccgccaaacaatgaaacctacaaaagaatttacagttgcagattatctgctcacccgactcaaacaattaaatgttaccgaggtctttcagatcccgggcgattatgtgaaacattttacacaagctctcgaagactttaacggaattaaaaccattggaacatcaaatgaattagatgcttcgtatgcagcagacgcctatgcccgtacccgaggtttaggagcggtatctttgcaatatggggtaagtacttacagcgcattgaatgccattgccggtgcttatgtcgaacgcagtcctgtggttgtaattagcgctacacccggagcagacgcaaggcaaattggaaatatgtacaatgtactttatcaccattctacaggcaatctcaatgccgatcaggaaatttttgaaagagtaaccgttgcggccgaaacgctgagcagctctgtagatgctcctgaaaaaatcgataacttaattattgcggcacttacacatcagcgtccggtttatatagcctgttataaagaggtatggggtgaaccttgtcctaaaccttccaataaaaaattagaacctaagatcataaaaagcgaagcagcggaattggagaatgcagtttcgcaagcctggacacaaatcagtcagtcaaaaaaaccgctgatttttgcaggagtagagcttttacgacacaatttatcaaagcagttagaggaacttattaaagtaactggaatgctgtacactacaacgtcactcggaaaaacagttcttgatgagaaaggagataagtttataggaacgtactctgatcaggcttcgatacctgaagtgattaaaatagtggaagcttcagactgcattttgtctttgggaacgattattaccgatgactatttatggctggtagaaaataaattttcagctatgatccaggtaaccacacaggaaatgcgggtaggttattttacttatgaaaatgtaaccttaaaagatttcatcgaagccttaaccgaacgtttcaaaaaagcttctggatatcctttaaaagcagtagctcccgctcagccaaaatttcccgaaccatggcgatccaactcagaccctaaatacaacaaaactcccgaagtaataacattcaaccgcttttttgagagagccacttattttctggaaaaacaaaaaatgctggacgatatcgtattcacttttggggtcagttcttctatgtatgtagccaccaatatgtacggattatctaagaatgcctttatttcttctgctgcctggcagtgtatcggttttgaaactggtgctgcttccggagctcagttaggaagtggtaaacaagcctggactatcgcaggtgacggtggttttatgatggtagcacaagcgctttcgaccctggtaaaatacaaaatcaactctgtaatcttcgtgatgagcaatggggtatatgccatcgaacaggtatatgttgacatggactcttttaaagaaggttcgtctcataagtttgatgaatttgatattcttccaaaatgggactatcaggcacttgccaaagcatttggagcaaagagctaccgtgctgaaaccgtaaaagaattagacgaagtacttcttaaactaaaggaaaaaacagatctgcccactctggtagaaattgtaattcctcaaaaagacctggcacagcagatggaaaggctggggaatgaataaaacaactagtaaaaagcaataaaaaaattaaaaacataaaatcatgagcaaaaaaacatactctatttttggagccggtgcagccggactctatacagcgtggagattactggatggaaaatccaaacgcgacaaaaatgaaaaaatgctgattaaaggcgatgtattagaactctacgactgggggaaatatgatttttctaaaaaaaaccagggaaccagagaggcaggagcacgcgtttgtacgtggcattataaagacaacaaagacaattcgtatctggaattgggcggtatgcgatattcatattgggacggcactccacaaggagcaggacatcgtgtagtcacaaaaacgatagagaaactggatttaaagaaagattcagttgaatttaacgaatctgctgatcctttaatgtctttgcgtaccaagaacatgtatgtctcagatgttaattcgaatcagccggctccttattttactaataattatggtgaagatgctccgccagatgatggattcaccaccatacaatctgtagcaatcacagcaacgtcaggtcctgttacccgtagagaatggtgtaagttttatgagaatggaaagatcgagattgacatgccggacagttccatctttcaaagaggagatttactaaaggatattggatattggaatcttgcctatgacagacttggacaagaaggatttggctatctggcagatggtaacggctatagctccaatgtagtaaatagtcatagtgcccagtcgtttaatgttaatgacgagtttacgccgggaacagaatataaaacgctggtaaaaggatattccagcttatttgttgccttatttgaggaagttgaaaaactagccaaacaaaaaggaattacgctgaattattttccggatacccgattgcgttcgattttgcatactaaggcagggattcgttttactaccgcaaaacgcgcaactccggataaacttgccgatagtaaaatatgtgatgctgcattcttggccatgcctcgcgcatccattgagctggtagctcaggcaacacgttatacagatgatgaaggtcaggacatcttaaaccacgaagaagtacagctctatctggaatctgtaattatggaaccttcctataaaatagggatgttttttactacaccatggtggagaacaaccgaagccggaagcccaacttatcctgccaaactaactagttactttttaacgcaggaaggaattgctaaactgaaaaaagaaaaatttccttctaattatctgaaagcaatagaatcagcaaaaaatcccgttattatcgcgacatcgtttaacgataaggccagttttatagctgcggtagaaaatgcgattcaggaacgcctgacttttaaagaagaaaagcaaatctcagctatagccgaattagataccattggtccaagtattaccgatatgccgatccgacaagtggtttattttggtgataatgccctcaatcaaaaaggggaaaaagtgtatggtattttggccagttatgacgacattcaatacaccacattttggaaagctttagaacttggccctcatggaacacgtgaaattccggagtccagagattgtcaaacgctagaggggccgcgtgtagctactccggtaatggtcaaaatgcttcgttcgcaactggcagcattacattttggaccacagacggattattcggccgtacctgaacctttagaaacccgatatatggactggtcgcttccgccattcaatgccggatatcatgcctataaatcacactataatctgggtgatgtacaacgaaaaattagaaaaccttcacaactcgttccaaaagcagactgcgatatttttatcgttggagaaacctattcaaacgatcaggcctgggtagaaggcgccttctgtaccgccgaatcggttctgaatgacttctttggtatcgaaccaattatagatgaaaaatactatccatttatcagtccggaatagtagattttggactgttttttaaccgcagagatcgcaaaggtttacgtaaagtacgcaggaatagtaggcggaaggatacataaaactgtgtgttaaaactaattgcatccagaaagttaaaggaaacaacaaaacaggcgattgtattggagtttgtcactccaatacaatcgcctgtttacttatctgaataaatcagcagttttaacaatgagtattgctattgaaaaaacgatatgctttctactaaaaataaaaaaaatctgtattaatccgcgttttcgtcctgtcgaatctacctaatccgagtgcaataaaatacggtacttaaagctagcggaaaacaaattggtaagttaaaaatctacaatgtttatttaaactaattaaaaataaatcataaaattgtgtttttataagaattttattgctaccattgtggtgctggattgatataactttttcgtagtatggtgatttattgctatggtatttaaaattatttaatctgggacatataattctttgagatttaaccaatattaaattaactaatctatgatgcacaaattaaaaaatgttacttctgtctttatttttataagcatgactcttttattttcgagatgtcaaacagaagaaatagaatcaaacaatgaaagccttattactgccaacgcaaaaaaatggtttgaaaaaagcgaaacaagcttagatgtattaaaatacacaaaattaatagattggaataatgctgttgttattaacgaagagggaagaaaagccgttgaggtacctctcgtcttactaaataatacttctacaaatgtcgttgaggataaagattataagagttatatgcgattactttttattgaagacgaagaaggaatatttaaagtatttgatattgactatactacaaaagatatagattttgataataatagcaaagaattcaatctttacaaaacgggtaccaagtattcaggatatataacggttcaaagtgctaaaaacaaagttgtgtattcgggaaaatttgaaaaaggagaacaagtaagtcttcataatcttgaccaaggcaaaaacacaacaaataggacagtttgtacttattacgttacagtggggccctatactaaatgtagtaattggatgtgggttccggattatgggcctggaagtttacctcccgggtatatgccgggtatatctggtcctatgtatgtaacatggtctgatgacatcctactgaacgcaccacaggaggcaaaaaaaatagcaaatagacaggattattttaaaaattttaatttaaactcagagggaacacttcatgtttatgtagatcagcctattgcaaataaatctgacgcctatgacggaatggtcaatcctgaggttggtcatacatttttagctattgaacaaaacggaattgtcagagttattggttattatccttcaaatggagtgaatccttttacttcaccaggttctagccccgcctaccttaacgatagtggacactcttatgatgttagaatatctaaaacattaactgcttcacagttatctgaagtaatttcaaaaattacaaattactctggccaatacaatttaaatacaaataactgtagcgattttgcacaacaaatagcagcaacaggaggtttaaaattacctaatactgatggatcttggccggggggaggaggaacaaacccaggaaatttagggcaggatattcgaaatatggcactaccttcgggtgctagtattaaaactactgggggaatagctctttctaactctaaataaacgaattatgaaaaatttaatgattaaatgtttactgattttccttataagttgcaatgtgcaaagtcaagaagaaaaactgatatttaattttattgctgcttgtaaagataaaaatatcgaaatacctgttataaaagataaatacatttgcgagggcaaacagcatacagaagcaaaagctactttagataaatttttaacagatggtattgcttccataagaaaagaattgcaatctaaggacttatcaaaattaaaaataataaaagcaacgaatgacaaagaagttcaaaaagaatttgtaataaccgatttttcgaaggtttttattttaaaagaaaacaaaaaaatagtactgtattttttaattgaaaatgatagaatagccgctttaagtgttttgaataagggaggcattaaaaattttataatattatgtaattagcctaaaataacaaagctccggatttcttcggagctttgtgtttatagggggaaatattgtaaaactagaattaattatttagcaatcagcttaagaacaaattccatttgtgtgtccttctgttcaaaaaagtcatccagagtaggccatacttcatagtcgggcataataccgtgaccttccggctggttcgcttttttaggtgcatcctgtacgacatttacaattgaaaattgtgtttttacttttgagttaggaagttcgtaaaccaatggtgaatgtccgttgtgaacgtagtaacctccaacggtttccagacctactatggtaacattatctacatatgcttttaccaaagaagcaaaatgggaagcagctgatgccacattttcattaatcaaaagataaagcttgcctttaaagagcggcgatttaggatggtaaaccggattgtatttctgatcctgaatactgatgttgttttggaataccggatacagtgatttcaggtattcttttcccgcttttagagcagtactatccattcgttctgaagttgaagtaccccaaaaatacttttcgagaggtaaaacattagggtcgaataggatgacagccttttcattttccttgaagggtttatcggtaaggtacataacaggctgttcgaagttaggatcactgcctcccggattatttctaacatcaatgatcagattagcaaccttatttttgtccagtgctgtaaaaatgctgtccaaaaatcgaacatagggtttaaacttaggatcgtctgatccataggccataccaaaaaatcttagattcaacaaacctgtagcggggttaatcatacggaagctatacggagactgttttttataatctagtaaatcagtaaccggagcactaaacctgtttttaagattggctgttctttcctttagcgttacggcacgaagcactgttttttgaagagcctccgattttggtacgctgtattctataataaattcatcacaaagaccatattcgagcaggtagtttaatccaaacgatttattgacactggccgataatttttggacaagatgatgaccatctgttgtataatatttgtagaaagagcgcattaattgtgcatcatttattccgtttatactttttattcttgaacctggagggatatccgatgattgaccgtcaaaaataatttgtccgttaatatagactagaggaaaagggaaaaaggacttttgtctgttcagaaagttgattaaatcgagatcgggaatggtgtaattgtgtaaacttccttcataatcggacaggcgaagcattattttgtaaaactcgatagtgctcatgggctttttaatacttttaaaggcaccgttgtaaatactgtctacctgttttttagagcggtattgatacaaaccggaatttgctttttcgtttattgttcgaagtattttaagatcctcctgcatttgttttggcgaaagtactttattgtacagcatcaaactatccttcatgatcttagcagagctttgggcctgaatagtacaggagaacgaaaacagccataagagggtaaaaaccgacagcagatttttaggattcgtaaatgcgttcgttattcgtttataaaaacaaatagttgtagtaatagaggtacggtacatggttttgggatgtttttttgtaatatttttcaagcttagggttagagtggttaagccaattgttgtttgatgtttttggtattcagaaaaaagagcagctggtctgcttttttagaattttctccaaagtcaatcaaattattaaaatcaatgattaaagactcaccactgttaaagtatatttttagccggtcagcaccacggccattaaaaaaattccagcttttaatttcggataaaagaatgacctgattttggattttagtatagatcggttttttatcccactctaatgtaagggtatctttgtcactgttgcaatcaatgcttaatgtaccggtgaatacgtatatcagaaaaaagaagaaaataaaatgaaaaaataagaggagaagatagtgcgttttaaatcctataactgcggataaaaatcctagaattgggatagaaattaaataagtgattaccataaaggtaacatttaaggttttaattttcataatttaaaatttaatgattttgtcggtgtcggtctttaaaaaatcttccatttatatttttcgaatatactaatatatcaaagaaattcctttcaaataagatgtttttctagaatttagaggatgtatttgttttaggtggtaataattatctttgcagtacttgtttacggacttcttgcctttttgaaagacgtaatgtccagttgtaaataccaaaataagacgtttgtgtctgtttaaatgcagcttaggttagctgaaaactaaaataactattgatttatgtacgagagaaaaatagaaaaagagtattcctgtggtatagagattacaagcgaaattattggcgggaaatggaaacctactttgatcaatcttattcatgaagggattattagaccaagcgatctgcaacgagccatgccggctgcatcaagacgtgcgctcaatattcaattaaacgaacttcaggaacatggtattatagagaaaaaaatataccctgttttaccgcttaaggtagaatactcccttacagaatttggaacctctttgcttccaataacccttgccatggaagaatggggaaataaatatcgcgagcattttagaaaacttcttgaactaaaaaaagaaacaaccaataaatagcgtagttatagggaataagtttgccgtatctgaatcgttatgccgttattgtggcagcttttttttggtgctaaatttgcaaaaaaaaagttatgattcatttaagcatattagattattctcctattgacgagaagagtaattcaagagaagccttaattgcaaccacaaaactggctcaacttgcggataaattaggtttcaaacgattttgggtttctgagcatcatggaatgcagactttagccggaagtaatcccgaaatgttaatgatgcaccttttagccaatacacaaaatatacgtattgggtccggaggtgtgatgctgcaacattacagtgcatacaaagtagcagaaggcgtaaagcttatggaagctttgtatcccggcaggatcgatcttggtataggaagagctccgggaggagataaaatcacacactcggcactaaaccttggaaagactagaatttcatcctatgaacagcaggttaaagatttaaaagcttatttgagcggtcaggaagaaataaattcttcgtttccgggtttagtcccatcacctgttgtcactaccgtaccacaattatggtcactgggagcaggaggtaatggaggattactcgccggtagggaaggtatgtcttatatattcgcgcattttattaaccctggcggaactggattgcaggccacagcagattatttctccaatttcagtccttcggtaataagctctaaacctcaaaacatggtagccatttttgcggcaattgccgaaacagaagaagctgccgaagagcttgctaaaggatttgatcattggatgttaatgatagagtcaggacgtgaaactccctactacatgaattttgacagtattcaggagtatccttatacagtggaagagaaagaaatgatcaggaacaacagaagaagaattattgttggaaatccggatagtgcaaagcaacaaatcgagcagcttgccgccgcataccaaaccgacgaagtaatgatattgccccagatttttggtaaagaaaacagaatgaaaaccctcgaattactggcagaggcattcgggttggagtaattacttcacttacatagagaagcgacaaaaacaccaagcttcttactctctaaacaacactgaaaaagagacatgaaaggaaatttttcctctttcatgaagggattctattgtctacaatttaattaaaaaatcaaataactgcgataagcataaaacaaaaaagtcatgccattcataaaaattgagattacgcgagaaagcgtaactaaagaacagaaacaaatccttataaaaggagtaaccaatttaattacagaaaccttaaacaaagatccgcatttgacccatgttgtaattcaggaagtagatctcgataattggggatatgccggagaacaaggatcagtaataagagaaagggctttacagaaaaaagaaaaataataaattcaataaacaatagaaacaatgaaaaaacaaacaatagtagttactggtgcagcatcaggaataggaaaaggaattgcaaaatattttttagacagaggggataatgtagttattaattcattactgcaaagcacccttgaagatacattcaatgaattaggagcgggaaataatcttgcgatggttgccggagatgtaagcgataaacaaaccggtgaacaattagtaaatgtagcacttgaaaagtttggatcaatagatgtattgattaacaatgcagggatttttgacagcaaaccatttctagaagtagatgaagcctatttggataaatttttgaacaccaattttaaagggacttatttcaccacacaagccgtaattcctcaaatgttgcaacaacaggatggggttgtaattaatattgggacaccgctggttaatcatggttttggagggttgcctgctactgcaccgatatcaagcaaaggagctatccatgccttaacgattcagttagcggccgaatttggaaaacaaaacattcgtgtcaataccatcgcgccaggtattatacgtacaccaatgcatggagataacgcagatcaaagtgccggtttacatctgttaaaccgtgtaggtgagatcgatgatattgcagaaatggcgtatacggttgcaaaaagcagttttattacaggttcaattatcaatgttgatggaggtaaaggagccggacgcaacttaaactaaggattaaatcattttaatggatcaagaacaaaacctggggagaaaaggctgaaagccagaaaagggatcaagagcaaaacctggggaggaatgtcaaaataaaattagaaatttgtaatctaagaattagatatgacacctatagagcttttaaaatttatgcttcctgattttttagtagaatactttgaagtagtttctactactaacacagaagaagtattgcatctgtattttgaagaaaaaataaaacctccacaagagtttaattcttttgaattgatttctaaggggtttcttgatgagattactattcaggattttccattaagaggtaaatttgtgtatttgcacattaaaagacgccgttggactaataaaaccaatggagaaatcatcaaaagagattggactttagtagctaaagggactcgcatgactcaggagtttgcgacttttttaaaagaaattaatagataagagtgctacagattgtcatactattggaggctttttcggagttaacggaaagagactccaaagacaatacaaaaaacatttaagctcgtttaatacatgggctccacgcgaacatgcgcaccaatggatgatttaccctgaaaacatgggcactcatttatccattgacgaggtggctttgtctcagggggaactttatactatcctgaccaacaagaaattcaaaggattttttatgtagtaaaaaactttcattattggcaaatataaataactttatgaaatttcaaatcaatttataagaattttaatgttaattaaaacaaatacgcaagtaaatatcttgcatctattgaatgttatcctaaaaaatcgtgttcttgtgttgggagtggcttatcttgcaagaaaatccatcaaaataataccaattttattttacttatagttcaatgtttctttttggcataactttctgattgctttttacttatagcaggaatcgttcttttcatgatataatgaatgaggatatgcgactccctgaagctctttcttctggaagaggagatttgtttgatatatatttacctccaaaggaattcatcctaactttttatctgttacaacctttaccggttcactgatatactgcacgaaaacagagatcggaaattgggacgaacaaaatcatcgatgctttgatacaaatacattttagctgctgttttggattaagcgctccccttcaactgcttcgttttttttctatgtcataacttctttctttcctctatacctctactacaaactcatccgcagagtcagttcacacatcgggtattgcaaactatttttcattacttaccttactttgggcataaaagtcacactataagtcagcagattccctaactagaactcacctgcatgcccgacattccttttctgttaaccggtacaaattacgatctgaagtactttctgcaagtcgaaccttactcataaggcaatgcgtctgtcattgggctttgtgcgcggttgccctcacaacaatactcgttacacactgctttttacaccccaaagcacatctgtatttctcatataaaagactgtctttccgtttaagatctgccgaacaggcggcacctgcctgatcatccaggaaaacttttcaaaaatctatgatgatttgtcctttaaagttttacattgccccgaattacagtaattattacacaggatacatctgcataaattaattttttttcaaatcaaaataaaaaaaccatcagttgcggctgatggttttttgtttattaagcttttcttgtagactctcgttctttcagttttgttttgataacgattgtttcatagtctgatgtttctccttccggctcttctaatctttgaattagtcttttggcagcgacctctccaatctcaattccgtgctgacttactgttgttaaacttggcgacaaacgtcttgaagctaaaattccatcggcaaaacctataattgaaatatcttcaggaaccttatatccttttttcagacttacccgtaatgcggccactgaatcattttcatccaaagcaaaaattgcatctattttatgttcaaaaatgccatcaattttactcttcatatcttcttcagaatcggtacgaagaattatattctcgtttaccggaatattattgtctgctaatgcttttaagtaaccgtcggctcttaatttcccaacacttaaattgtctacggatgaaatcagagcaatatttttacatcccaaatcaattaaatgctgtgttgaatttaaagcagaatcaaaatcgtcgactattactttgtcacattctactccatcagctattctgtcaaacatcacaataggtgttccatcagcaatgatcgccgaaaaatgaccataatcttctaatttttgcgcttcttcagatactgacaatataaatccgtcaatcgttccgttgcttaacatttcaagcgtatgaacttctttttccagagattcgttcgaaatacaagtaattacattatatccttttttatcggctactttttcaataccactaaaaacctttgcaaaaaaggagtttagtatattaggtataattacacctattgttttagttttacgattctttaaattcaaaccaataacattcggtttataatttttgagtttggcatactccttaatcttcacctttgtttgctcactgatctccgggctatcatttaatgccttagaaacagtagatacagaaacaccgagttccttcgcaatttgctttagagttgctttagctttcatttaaaaataaattttatgtaattaatacaaatatagtagaattacctaaaataaaacaaaaaacacgttatcctatttaaaatttcagagtgttttttaaaattaacttctttttcaaaaccgtaagccttaaaatttcgttaatacctgaatacatgcttttaaccttttaaaatccttgattatgaaaaacgaagttaaaattcatgaagttgacccttcattgaacaacagaaggagctttctaaagctcagcggccttacattagttggcgcaggccttcttatggccgggtgtagcgataatgacaatgacgatgatatggaagacactacattgcccggaatcagaaacggagtttttgatttagggtccggtgattttggagtactgacctatgcgtatgctctggaacagctggaagccgatttttatactaaagtcgtaaactcaacaagctttaatgtcacttttaatcctatcgaacgccaggtattaacagatttgtatcatcatgaagtaattcacagggattttttcaaggctgctttaaccggagcgcttcctgacccaagttcgcaactgcttccctccttggcttttaattatggttctttaaatttcaacagccgtactgaggttcttgccacagcaaaagctcttgaagataccggagttgctgcttataacggagcaggaaaactaatcaaaagtgctgattatttacttttagccggaaaaattgtttcggtagaagccagacatgcctcagccatcagaagcttaatcaatcctaactctaaggattttgccggagatgatattgtaaacgcaagcaccggtttggatgttgctcaggatccttcaaaaattctaccaattgcaggaggcttcattaccacaaaattcacagccaaatatttaccttaatcttaacaagctaaaacttagaaattatgaatattttaaaatttatagaaacgtttactgatgatagcttgatgagaagcactggttcaagaagagacagttttaatcagtttggaagtattggaaaaacactggcttatgcatcaatccctttcggattatccgcaatggccaataaagcattagcaaaagacattaccgcaactcctgcaactcctattggagccttgcaatttgccttaactttagaatatctggaaaacgaattttatgctatggcattagattccggagtaattccggcatcagaaaatggaggaagagatcgaaaagtttttgaacaaatagctgcgcatgaatctgaccacgttaagtttttgattgcgggactgggcggaccagcaagtgcaaactttgtggctaaacctacttttgactttaccgttggaggagcttttgacccgtttcatgactacccaacctttttagcattagcacaagcctttgaagacacgggcgttagagcctacaaaggtcaggcagcaaatttaatcactacacctgatttattgactgccgcattacaaattcactctgtagaagcccgtcatgcttctgaagtacgacgcttaagaggattaaaaggatggatttctaacagtgagagaggtgcaggaatgcccgccgcaacacaagcggtctatgatggcgaaggcgttactgtacaggcaggattcaataccgcagctgcttttggagcttctgcaggatcagaagcttatgatgaaccacttaccacacaacaggtcgttgatattgcaaatatatttattgtttagtacaaataattctaaatattgaaccatctttacactacttgtgaaggtggtttttttttatagtttaaaattgaaaactgatgcgctgattttcagcagataaaatattcttttcaggtatttggttttaaaataattaattgtacttttgcatcccctttattggggatggaatgtttaattaaaataatattatggacgcattaagctacaaaacggtttcagctaacaaagccactgtaactaaagagtggattgttgttgacgctgaaggtcataacttaggacgtcttgcttcaaaggttgcaatgatcttaagaggtaagtacaaaccaagttacacaccgcacgttgactgtggagataacgtaattgttatcaactcagaaaaaattaaccttacaggtacaaaaatgaatgacaaaatttacatgcgtcatacaggttacccaggaggacaaagaactttaactgctaaagtattgcaatctaaaaatcctgcattattagtagaaaaagctgtaaaaggaatgttacctaaaaacaaattaggagctgaactttttagaaatctaaatgttgttgtaggtgctgagcatactcacggagctcaaaaacctagaactgttaacctaaacgatcttaagtaatgggagttattcacaaaatcggtagaagaaaaaccgctgttgcacgtgtatatgtttctgaaggaacaggaaaaatcactgtaaacaaaaaagaattcgcaacttactttccaactgcaactttacaatacaaagttttacaaccattatctatgacggaaaatgctagtaactttgatgtaaaagtaaacgtttacggaggtggttcaactggtcaggcagaagctgtaagaatggcattagcacgtgtaatgtgtgaagtgaacatcgaaaacagagctatcttgaaaccagaaggtttattaacaagagatccaagaatggttgaacgtaagaaattcggtcagaagaaagctcgtaagagattccaattctctaaacgttaatattacctgtcttgtacatttggtacaggacactatcaattatttattgaaattaaaaaacacagttgttgttgctctcctatcgaggtaggaaatagtttagcatctaaatgggttaagcgattataaagattgaaagattaaaaaggttgaaagattgaaaaatctaaaaatctaaaatctaaaatctaaaatccaaaaagacacattgctaatcaacagaacgtaaactagtacaaaaatggcaaacaaaatagaagtaaaagaattactagaagcaggtgttcacttcggacacatgactagaaaatgggatccaaacatggctccttacatttatatggagcgtaatggtattcacattatcaatctatataaaactgcagctaaaattgaagaagctaatgaagctttgaaaaaaatcgctgcatcaggtagaaaaatcttattcgtagctaccaaaaaacaagcaaaagacatcgttgctgataaagcaaaagctgcaaacatgccttacatcactgaaagatggccaggtggaatgctaacgaacttcgtaactatcagaaaggcagttaaaaaaatgtcttctatcgataaaatgaagaaagatggtactttcatgacgttatctaaaaaagagcgtttgcaagttgatcgtttacgtgctaaattagagaaaaacttaggttcaatcgctgatatgtctagactacctgcagcattgttcgtagtagatatcaaagctgaacatatcgcaataaaagaagcacaaaaattaaacattccagttttcgcaatggttgatacgaattctgacccaagagaggttgattacgtaattccagcaaatgatgatgcttctaaatcaattgacaaaattttatctttagtgactactgcagtaatcgaaggtctttctgacagaggttctgaaaaagaagttgaagtagctgaagaagctgctcctgctgctgaggctgaggctgctcctgcaactgaagaataaatcaaattttaaattccaatttttaaattccaaattccaaatacaaaattaaaaacgttatgttgataatttaataaaattggagtttgggatttagaagatggaatttttacttttaacattaaaattcaaaatattatggcaacaattactgctgcagacgtaaataaattaagacaatctacaggtgccggaatgatggactgtaaaaaagctttagttgaagctgaaggagatttcgataaagctatacaaatccttagagaaaaaggacaaaaagttgctgctaaccgttctgaccgtgagtcttctgaaggagctgctgtttcttttattaatgcagacaacactaaaggagctatcatcactttaaactgtgaaactgacttcgtaggtaaaaatgaagctttcgtaactttagctaaagatttagttgaaaaagcgatcaacttctcttctaaagaagaatttttagcttcagatttcaatggaattactgttgctgaaaaattaatcgagcaaactggtgttatcggtgagaaaatcgaaatcggtggttttgaaattttagaaggtgctttcgttggatcttatgttcacgttaacaaaattgctgcattaactgcaatttctactgcaattcctaacgctgacgttttaactaaagatgtttctatgcaagttgcttctatgggagctgatacattatcttacaaagattttgatcctgctttcgttgaatctgaacttgctgctcgtattgctgtaatcgaaaaagataatgaagaagcaaaacgtttaggaaaaactttaaaaaatgttcctaaatacatctctttctctcaattaactgaagaagttttaaaacaagctgaagaagatgctaaagctgaattaaaagctgaaggtaaaccagagcaaatttgggacaaaattatccctggaaaagttcaacgtttcatttctgacaacactactttagatcaagaaaaagcattactagatcaaaacttcatcaaagatgacagtaaaaaagttggtgattacgttaaaggattcaacgttgagatcacaggtttcaaaagagttactttaggttaatatattatttcaatatttaaaaagcccgaatattaatttattcgggcttttttttatgcgaaatgtttatttgtgagatgtgagatgtaaaaggtgagaaagttagaatagtgccctgaatctatttcatcttcagagcaactcgattatttcgtaaacctcaagttttcctctaattccatcgcaccttttacatttcacattccaaatctaactatttacttcttgatcggaaaatttctggctctcatcaaagcatctgatttcggagctcttcctctaaagttttcataggctttctcctgatcaatcgtgtttccaacactaaaaacactttcgtaaagacgttttgctactgctttatcataagccccttttccttctgtaaaagcttcccaggcatcagcattgatcacgtctgcccataaataactgtaatatcctgctgaataaccatctcctgaaaagatatgtccaaattgcggaattctatgacgcattacaatttctgacggcatatgaagtgcatctaaagtctctttttcaaatttatgaggatcaatagtagtggtagccaaatgaagcttcatatcaatcaaagagctcgaaatagtttctacagttgaaaaaccttccccaaaattagctgctctttcaattctgtcaaccaaagctttcggtaatggctcacccgttttgtaatgtaatgcaaacttgtttagtacttccggagtcgctaaccaatgctctaataattgagaagggaactcaacataatcacgagctacagaagttcctgctaaacttggataagttacatttgaacacaatccgtgaagcgcgtgtccaaactcatgaaacaaagttgaagcatcttcccaggagattaaaataggctcgtttggagctccttttacaaagttacagttgttagacacaatcgtcaacacctctccatccattcgctcctgattgcgataggcgttcatccaggctcctgaacgtttgcctgcatgcgcataagggtcaaaataccataaaccaactgttttacctgtcaatttattacttacttcccaaacacgaacgtcaggatgataaaccggcacatttgtgatttgcttaaaattcaaattaaacaattcgcccgctacccaaaacattccttctcttaatttttccaactgtaaatacggtttaacttcattctgatctaaatcgtacttcgcttttctaactttttcagcataataacggtaatcccatggctgaattttgaatttacctccttctgcatctacaatcttttgcatttctgctacatcttcacgcactttttcaactgcaggttcccatacagaaagcattaaatctaaagttttctgaggatcctttgccattttgttcgataaactccaatgggcaaaagtagggaaacctaataatttagcttttttcgttcgtaattctaaaatagaaaccaatgtcgaattgttatcattcgcatttccattatcaccacgttttacaaaaatatcaaatgctttttcccttaaatctctgcgtgtcgagaaagtcaggaatggctcaattgatgaacgtgtattagcaatacaccccataacattcagttttctgtctttagcttcagcaatagctgctttcttaacctcttcaggcagtccgtcaaaatcactttctgttttcaattccacatattgattttgttcttccgccaataagttctgactaaaacgggtaaaaagtgacgccagctctttatttatcgcggccactttctctttatccgcttcatttaactttgctccctgacgaacaaaatttgtataatacaaccagatcagacgctgttgttccttggttagttttttactctctttagaattatagagcgtttcaactcttgtaaaaagctttttattctgattgattttatcactaaactcagagaacttaggagacatttctctgtcaatagcactaaattccggactgcttaaattagatctgtaaattccgtaaacagtagaaatcctgtccattgtttcccctgaacgctccatagcagcaatcgtattatcaaaagttggcgcttttggattgttagcaatagcctctatttggtttagtttttcctgaatcgcaaattcaattgccggtttaaactgcgaaactttatactcattaaaagcagggacaccgccgtagggacctgtccatttttgaaccagcggattgtccgggatggtctgtgcgttagccgcaaataaggttgttcccatgagaaaaattgtcattaattttttcattatcgttgatttgttttaaaattaggttatcattccaaatgtaactaaaaatcagtattcatttggaaattttaactttggaatcctctaaaaactaccctttaatttaaatattccgctaaaaagttatagagaaatagtttaaatttgaaacatcattaaccgaaccacatgtttaaaacccgtagagaaattgtttttgtaattctggctggcatctttataaccaatgctgttgtagccgaacttattggaggaaaattaatccagattggaccatttgtaatgagcattggtattttaccctggccgattgtctttctaacaaccgatttaatcaatgaatattttggtgaaaaaggagtcaaaaaactgtcctttataacagcctgtttaattgcttatgcgtttctgatcttatttatggctattgtgatacccgccgccaaaggaatcagccctgttaatgacgaacaatttaaggcggtttttggacaaagtatgtggatcatcgtaggtagtttaattgcctttatggcttctcagctgattgatgtctggatcttttggtttttcaaaagacgtaccggagagcgaaaaatatggctcagaaccacaggatcaactgtaatctcacaattgtttgattcttttatcgtacttggaattgccttttggttacccggaaaaattgatttcgatacttttatttcatcaggattaacaggttacattttcaaactatccgtagcggttttactgacaccggctatttatgcaggacatcacctgattaagaaatatttagacaaagatcctgaacacgaaaaatccaaacacttaaacaatggagagtaaaaatctagtacgctgcggctggtgttcttccagtgatttatataaaaaatatcatgatgaagaatggggtgttcctatttatgatgatccgtctatattcgaatttttaattctggaaacctttcaggctggtctaagctggattaccatcctcaataaaagagagaatttcagaaccgcttttgatcatttcgattataaaaaaatagcccaatatccggaagaaaaaatagagtctttgctacaggatacgggaattgttcgcaacaaacttaaaattcgtgctactgtttcaaacgcacaggcattcctgaaagtacaggaagaatttggcactttctctgactatatttggaaatttgtcaacggaaaaccgatcgacaacaacccaagaacattaaaagacgtccctgctactactccaatttcggacgaaattagtaaagatttaaaaaaaagaggcttcaagtttgtcggatcaaccgtgatttacgctcatatgcaggctacaggaatggttaacgatcatgttgaagactgctttgtccgaaaggggaaatagttttagtcacgatctcagtcgcagtcgcagttttcagtttataaaacctgatgtttttaagtgaaagactgaaaactgcgactgaaaactgaaaactttaaaaaaaacattatatttgcttcacactttaggggtgtctgcaattttgcaggctgagattttaccctctgaacctgatctagctcacactagcgtagggaaaagtaagatgacttctgcgcgcatttctatgcgcgattgtagccattcctaaagtataactacatactaaacttaaaggaatggaactaaaaatcaaccaacaaatcaaaaaattcgatgctgaatcgttaagcattcagtcattgctcgatctcgaaattcccaacaaacaaaacggaatcgccgttgctatcaacaatactgttgttccaaaatccaactggaacgaacaacttgtatccgaaactgacgaaattctaattatttctgctacacaaggaggatgaaatttcaatttttcaaatcccaaaacccaaattccaattgtcaagtaagaagtagacgcactgctgtgcccctctacaatcgacaattacattttcacctcttacattttacatttcacatctcacaaaatacaactacaagctatgactacagaagaacaaatttccagaaccccgtttcctaattctaaaaaagtttacatcaacggagaaatacaccccatcaaagtggccatgcgcgagattcatctaagtgacaccaaactttcaaatggcggaattgaaaaaaatcctcccgtaacggtttatgatacctcaggtccctataccgatcctaatattgaaatcgatattagaaaaggtcttccaagactaagagaacaatggattttagaccgaaatgatgtcgaaattctgaatgaaatcacttcagattacggacaaagccgattacgcgatgagagcttaaatcatcttcgatttgagtatttacatcagcctaaaagagctaaaaagggcgctaatgtttcacaattatattacgccaaacaaggcattatcactcctgagatggaatatattgctattcgtgagaaccaacgaatagagcttttaaacgaacaaaccaaagcgatgcaatgtcagcacggcggtcatagttttggagctaacacccctaaaagtaaaatcactcccgaatttgttcgcagcgaagtagcctgcggaagagccattatccccaacaacattaatcatcctgaaagtgagcctatgatcgttggtcgcaactttctggttaagataaacgctaacattggcaatagcgccgtgacttcgagtattgaagaagaagtagagaaagcagtctgggcttgccgttggggtgcagatacgattatggacttatcaacaggtaaaaacattcacgaaacccgagagtggattatccgtaactctcctgttccaatcggtaccgttccgatttatcaggctttagaaaaagtaaaaggaattgccgaagatttaacctgggaagtttttcgcgacactttaattgaacaggctgagcaaggtgtttcttattttacgattcatgccggagtactgttacgttatattcatttgactgccgatcgcgttaccggaattgtttcgcgtggcggatctatcatggccaaatggtgcttgtttcaccataaagaaaactttttgtacactcattttgaggaaatctgcgaaatcatgaaacaatatgacgtggctttttctcttggggatggtttacgcccgggttctattgcagatgctaacgatgccgctcaatttgcagaactggagaccctgggagaattaactaaaattgcctggaaacacgatgttcaggttttcattgaaggtcccggtcacgttccgatgcacatgattaaagaaaatatggacaaacaactggaacattgtcatgaagcacctttttatactttaggcccactaacgacagacattgcaccgggttacgaccacattacctctgccattggagccgcaatgattggctggtacggctgcgcgatgttgtgttatgttactccaaaggaacaccttggtttacctaacaaaaaagatgtgaaagatggtgtaatcacctataaaatttcagcacatgctgccgatcttgccaaaggtcatccgggagcacaataccgcgacaatgctttaagtaaggcccgttttgaattccgttgggaagaccagttcaatttagcccttgaccctgatacggccagagagtttcacgatgaaacccttcctgccgatggtgcaaaagtcgctcatttttgttcaatgtgtggtcctaaattctgctctatgaagatctctcaggaaattcgtgatgtagccgcggccgaaaaaggcatgcaggagaaatcagaagagtttattgaacaggggaaagagatttacatataagcacacatattggtctttagtgattagttactagtccttagccttactctaccgaataaaatcgaaaaacaactaatcactaatcactaatcactaatcactaatcactaatcactaatcactaatcactaatcactaatcactaatcactcctctatgatcgtaattaccaatccttccgctatatcaaatgaaatcagcattctggattctttatttgaagaaggattggctttgcttcatatcaggaaacctgatttttccgaaattgaaatggcaacatttattcatcaaataaaattagagaacagaaacaaattggttctgcacaaccatcctattctggcagaagattttggaattaacagaattcatttttcggaaaaggaaagaaaagacaacactttaatttcttcagaaggaaaatcattttcgacagcaacgcattcaattgaagatttcaattccttatcatctgcattcaactatgctttcttaagtcctgtatttaaaagtatttccaaagaagattatcatccaaagacaaacctgtttgaagctttaaactcaagaacaaatcacaggactaaagttatcgctttaggaggaattgatactaaaaacatccaaaaaacgctcgaaaatggctttgatgatgtcgctcttttaggaagtatttggaaaaatgaaaaccctataaaacaattcaaattatgtcagcaaatcgtccaatcgcactttcgatagcaggttttgatccctcgggaggtgccggtgttttggcagatgtcaaaacatttgaacagcatcatgttactggatttggcattttaacctccaataccattcaaacggaagatcaatttattgaaattcaatggactgatttgagttttgtgattcgttctattgaaaccttttttgatcgttataaaattagtgcggtcaaaattggaattattccgtctttgaattatctgaaccacattctttcaaccataaaaagaatatcccctggcactttaatcgtttgggacccggttttaaaatcgtcaacacaatttgaatttatgagtattgaagatcgtttagaattgaatcctacgttgtcaaaaattgatttaattacgcctaattacaacgaaattgaaatactgtttccgggttttattcttaatcaacttgagtttcagaataaaattccaacaaacattctattaaaaggcggacatcatccttcggcaaccggaactgatcgtttgtttctgaaagacgaaatcatcgatcttctgccttctgataaaaaatgcttcgcaaaacatggttcaggctgtgtattatcggctgcaatagctgcaaatcttacacggaatcaatctctggaaggatcttgcaggaatgcgaaaacctacatagaaaaatacctgaattccactccaaccttaatcggacatcattatgtatcataaattacaatatatctcgcagggaagaacaatagaagaacagctgtataatatccatgaggctttagatgccggctgcgattgggtacagctccgttttaaaaatcaaactgaaaaagacacttttactctggcggaagcagtaaaatttttatgtgaagagtatctcgctaattttattgtaaacgacaatctgtatctcactcagcaaatcgccgcagacggagttcatctcggactatcagacatgaaaattgatgaagcaagggcaatactcggaaatactaaaatcataggagcaacagccaacacttatgaagacattgaaaatcacatcaaaaacggctgcgattatattggtttggggccctttcgttttacaacaaccaaagaaaaactaagtccaattctgggattgtcaggttattttaaaattattcagaatctaaaacgcaataaactggagattcctgtttatgccattggaggaatcactctgaacgatgtcgctcctttaatggaaacagggattcatggaattgcgatctccggaatgcttacagaaagtaatcaaaaagaaaaactcattcaacaattaaacgaaaagttatatgcaaacgtcattgtttaacataggagataaaaccttaacctcccgtctatttttaggaacaggaaaatttggttcgaatctggaaatggagaatgctattttggcatcagaaagtgagttggtcactgtagcactgaaacgtatcgatctcgaaaccgaaacggatgctattttaacacacttaaatcatccaaacattcatttattacccaatacatcgggagcacgaaacgctaaagaggccgttttcgctgcacaattagcgagagaagcactagaaacaaactggctgaaacttgaaattcatccggatccgaaatatctgatgcccgatccgatagaaactttaaaagcgacagaagaactcgctaaacttggtttttttatcctaccgtacatccatgccgatcccgttttatgcaaacatttggagagtgccggaacaaccgctgttatgcccttaggctccccgattggaagtaataagggtttaaaaacgattgattttttagagattattatcgaacaaagtaatgttcccgtaatcgtcgatgccggaatcggatctccgtctgatgctgcaaaagcaatggaaatgggtgcagatgctgttttggttaataccgcaatagcagttgccggaaatccgacattaatggccgaagcctttaaagaagcggtaatcgcgggccggaaagcctttgaagctaaaattgctcctcaacaaaattatgccatggcttcaagtcctttgacctcttttttatatgagtagactaaaccatttaaccgcaaagttcgcaaagaaaagcgctaagaacgcaaagctttgcaaaccttgcgtaaaactccgcgcactttgcggttaaaaactatgaaaacattcaaatcggtttttgagaattatgattggaatactattcaatctaaaatatatcaaaccacatcaaaagatgtagaacactctttgtttaaaaccaaacgaaatctcgatgattttttagctctgatttctcctgctgcacaaaactatctggagcagatggcacaaaaatgccatgaaattaccaaaaaacgttttggcaaaaccatacaaatgtatgctcctttatatctcagcaacgaatgccaaaacatttgcacctattgcggatttagtttagacaataaaatcaaacgaaaaaccctctctgatgctgagataaaaattgaagtagaagctttaaaagagattggttttgaccatgttttattggtgactggtgaggctaattataccgtaaacattaattacttcctaaatgcaattgccttaatacgtaaagaattctctattatttctgtggaagtccaaccgctttcaaccgaagattatgaacgtttgcatcaggctggtgtttattcggttttggtatatcaggagacctaccatcaggaagtatataaaaaataccatacgaaaggcaaaaaatcaaattttgattatagactcgaaacacctgaccgtattggtacagccggaattcataaaatgggattgggggttttactggggctggaagactggcgaaccgacagcttttttaatgcgttacatctggattatcttcaaaaaaaatactggcagactaaatattcggtttcctttccaagactccgcccggcagaaggcattattgaaccaaattttattatggacgataaagatctgacacaactcatttgtgcctatcgtttgtggaatgaggatttggaaatttcaatctcgacacgtgagaatgagaaattcagaaaccatattatccctatcggtgtgaccagtatgagtgcgggctctaaaaccaatcccggtggttatgttgttgatccgcaatctctcgagcaattcgaaatcagcgacgaacgttctgccaaagaaattgcacaaattataacgaattcaggctatgaacctgtctggaaagactgggacaaaatatatagtcataaagaggaaagtctaaagtcttaaagtaaattcttttacttcaattctaacttttgacttttaacttttgacttttaacttttgactttctaactttaagacttaaattacaatgagcattatacaggaatttttacgctacaacaggcaaaccattcttcccgaaattggtgacgaaggtcaggagaaacttaaaaaggccaaagttttagtaattggtgccggcggtttaggctgtcccattttacaatatattgctacagcgggagttggttttattggtattatggactttgacactatcgagatccataatcttcaccggcaaattttatataccgagaaagaaattggtcaacttaaagctgttgttgcaaaagaagtggttttgaaactcaatccattaataaaagtcgaagccatagtcgaaaaattaactccggaaaatgcccgacaggttattgaacaatacgatatagtggttgatggttcggataattttaccacacgttatttggttaacgatacctgtgtggcactgcaaaaaactttggtctatggtagtatcttaaagtttgaaggacaaattgccgtttttaaccataagggcagtaaagatttacgcgatttatttcctgaaatgccggatccgaaggatgttccgaattgcaatctcaatggtgttttaggaacattacccggaattattggcacgatgatggcgcatgaaacgctcaaaataattttggaattacccactttaaacaatgaactggtactttttaatacgatacactggaattttaccaaacttaatttctaaccaaccatctcgtcctcataaaatcctttacacaagttgaagtagattctttcattccttttttaagatagctataaactcctcgcgatcaatctcacgacagcctagactttctaaatgggaattgtaaacctgacaatccaagagttggtagttcccttcttttaaataatttaccaaagctatgaaagctacttttgatgcattcgagactttcgaaaacatactttcaccacaaaaaacatgacccaaatcgatcccatacaaacctcccacgagaacgtcatcctgccaaacctcgacagattttgcgattccctgcttgttaagttcacaataggcatcaatcatttcgtttgaaatccaggttccgtcttgtccttcccgttttattttttgacaattcgaaatcacctctctaaaactttcattaaaagtaaccgtgaattgttttctattcagaacattacgcatgctttttgacacaatcaattcctctaaaaacaaaaccattctgggatccggtgaccaccaaagaataggctctccttcattaaaccacggaaaaatcccgctttgataagccaatttcagtctttccggatctaagtctccgccaatagcaagaattccttcttcatcggcttctgaaacgggtggaaagaacaactcgttaaatacgtaatacatttaaaaaaaatcaattataaagttccaaatttcaggattgtgtttcaacctttcctttttcagagttgacaaactactgcactaaattttcatacaaaaacaaattccaaatcccaattacaccttttatgaattggaatttggaatttatttttgaagtttaaacgatcttagaacggtaaatcgtccggttcgtcttcgtttaaattagttgcaggtgcaaaagcttctgcagctggcattggaggcgtttgtccaggaccttctggtgccagtctttcgattctccaaccttgaatactattgaaatatctggtttctccttgtggattaacccattctcttcctcttaaattgatagaaacttttactgcctcaccttgtttgtagctacttaataaatcgcatttatcttgcgtaaattcgatcaaaatatgctgtggatactgctcatctgtggtaacaaccaactctctttttttgaatgcagcactaacttgttgctctgggttcaccacttttactttacctgtaacttccatcttctttctatattaattattgtttctattcttattgttttgctaaaagtactttccaggccgatgaaatatcatctttattgagatattttttggcttccaaatgtactttttcgagatcgtccgagcttaaaactccttttaccgaaaaattttctttcacaaatatactaacttcttctgtggtaggcaaggcttcaatgttccctaattttccaagatcattcccatcaaaaacaggactttctttaataaaatcaggaattacatctactcctaccccaagagttgtcaagggtttaggcacttcaaaaagcccctgattcgatcgggaataccaattactgcccaatcttgaaaccaaatctattttatgctgatcgatggctccgttttcatctaaaacagcttcgctgatatgaagcttaaccacttcacaaagaatcagatttcccgcgcctccctgatctcccaacggaataatctgagtgactttacattcaaactgtaccggagactcttttacacgataaggttttacaaaatcggacgggacttgtgtcaatccggcttttataaattcatttacaccatcaccatattcggtactggctaatgatgtctgttgtaccaaatcataattcacaacatttataactacttcgcgggtttcctcagcgttaattaaagtatgctttatggtattgtcgcgtacacgtcgtgccggtgaaaaaaccaaaattggcggattggcactgaacacattaaagaaactaaatggggacaaattgggtattcccttagcactaattgtactagcaaatgcaattggcctaggtcccacagcactttgtaaatagccttgcaatttggccgttggtatttcttttggatcaatactaatcatatttttctttttaaaggaatctcatttccgtagctacaaaaatagaaaaatcgtttaatccaaagaaatagtttcagactttaaaacaaaaaaatctttatcgttacacaaaatattaaatgtgtatatttcgttatatttataccacaaaaaaatatttatgtctttttccgagagaagaaatacaacccgttggatcattattaccatttcctttttaatcatttccctgattctctggaacacttatacttttttccaaatctttaaaaacgaagaacgcttaaaaatgaatctttgggccaatgcacaaaagacactggtcaatgcagatgaaaatacagatttagatttaccgcttgaaatcatcaacaacaatacctcagttccagttatgcttatcatgtatgacaaggtgattagttctgtgaatgttcctgaagaagtcctgcaaaataacgaaagcaccttatcttatctcaaaaatctgaaaaatgagaatgagcctatcgttattgaatatgcgcccggaaaacatcaggaattgtattatgggaattcggcattgattaataaactgaaatattaccccatcgccttattgctgattatctttttatttggggctttgatttataatttttacagaagtaccaaaatggctacccaaaataaactctgggcaggaatggcaaaagaaacggcacatcaaatcggaacgcctttatcctctttaattggctgggtagagattttaaagacagaagaaatcgattcgtctataacttttgaaattgaaaaagatattgaacgtttacagacgatcacagaccgcttttctaaaattgggtcggttcctgttttagaggagagagatattgttaccgaaactttgaatacttatcaatacctgcaatcccgtttttcaaagcaggttactttctcttatcggacacctcaacaaagtataccggcaatgataaaccctacactgcacagctggactattgaaaatttagtaaagaatgctattgatgcgatgaaaggaaaaggaacgctggaccttcaaattgaagaagatgcacatcatgtaaaaattaatgtaaaagactccggaacaggaatttctaaaaagcagtttaaaactattttcgaacccggttttacaactaaaaaacgcggctggggacttggactttctttaaccaaaaggatcgttgaagaatatcataacggaaaaataaaagttttacagtctgaaattggaaaaggaactacttttcagatttcattaaacaaaaaagtgccgtaaaagacttcgacttcgctcagtctgacgtttcgacttcgctcagtctgacatagtgctttataaattcgactgatttcgttaaataaaaaagtgcagcaaaaatttacttttactacactttaatctattttatttcgactgtcaaatcgagcggagtcgagattcttttatgcttgaaacgagagacttcgacttcgctcagtctgacgtttcgacttggctcagtctgacgtatttggcttcgctcagtctgacatggtgttttataaattagcctgaatatccttggccaaagcctcaaattcttctttagaaagtgaaactttattttgaaaacgcatttcatccatttcgtttaacggaatcaagtgcacgtgtgcgtgaggcacttcaagaccaacaactgccactccaactcttttgcaaggaaccgttttttccagtgctgctgcaattctcttagaaaacttcattaatcctaaatacaactcctcttccatatcaaaaatcttgtcgatttcttgtttcggaatacaaagcgtatgtccttttgcatttgggtttacatctaaaaaagccagataattatcatcctcagcaattttataagcaggaatttctccgtttactattttggtaaatattgatggcattatttctttgtttattgggtgaatcgtctaaccgacttaacgattaaacgcgaaaaattagtctctggtgatttcaaggatttcaaatttcaaaactccatttggaaccgtaatttcagctacttctccaacagatttccccagtaacccttttccaataggagacgttacagagatttttcctgtttttaaatctgcttcactttcagcaacaagtgtatatttcatttccattccattgctttgattcttaattttcacattagaaagaaccaatgccttcgaaacatctaattgtgattcgtcaattaatcttgcattagaatacacttcttccagtttagcaattctcatttctaataaaccttgtgcttcttttgcagcatcatactccgcattttcagacaaatctcctttatctcttgcttctgctatatcttgagatgcctttggacgcattacactttttaaatgctccaactcatcttttaatttttttaatccttctgctgtataataagatactttactcataacttcgtcgtttatataaatacaaaaaatcccatcgggacgggatttcttaattacaaatatactattatttttaatagtacataattatatgttaatcatatagaatccaaatgtaaataatttatttttgtttcactaattcttattaaaataatgaaaaaattctggtgcttaatcgtctttgtctctgtgcttttctcctgcagtgaaaatagtagacgcgacaaaaacccttacattcctagttatgcagttaacctgtctattgatactaatctgcctgcttattccaatcttaaatttgtaagtaatggcgtgattattccaaattacggagcaaaaggagttatcatttttaataccggaagtggttacaatgcgtttgatgccgcctgtccgaatcagcccgtaacttcctgcaccgccatgacaattgacggcataaatgcagtttgttcctgcgataaaacagcttatagtttatttaccggattgggaggtaaagattatcccttaaaacaatatcgcgtagaatttaccggaacaataattcacgtttacaattaaaaaaacaaaagcctgaaaagttattttttcaggctttttacattttacgtttgacttcttatttttttagaatttcaatgtcaatccggctaagaaattaattcctgcctgaggataataggaaggataaacatcccacattgctccgtttgaaacatattttttatccagaaaattgttcaccagaccagtaatcaaaattgatttgaatactgattttggtttgatttcataagacacattcaaatcatttacaaaatagtctgccaattttgctgccggtaattcaatattgttcatgtattgttctcctacaaacttctgcaataacgaaatgtgcagattttggatcggactgtatacaataatatttcccgcaattactgatggtgaataagcgatattggttgttccgtaatgtgtaccttcaacagctaaatctatatttttattactgcttaaagtaaaattcggtctaaggataaacttttcagaaagttgtatggtggcatcaacttctagacctaaacggtagcttttctcagtgttagcacgaattggagctccaacatcgtccaatcttccagtcaaaatcaactgatctttgtaggccatataatacacattcgaattcaattgaaatttatctgaattgaatctccagcccagttcaaaatcatttagtttttcaggttttacatttccaccttcataatcggttctgttaggctcacgattggctcttgcgtatgaaaagtaaagggtgttttttgaattgattgcgtaatttaaacctgctttcggattaaagaaattaaaactgtcatcaaccaatcctgtatcttttccgttggctttgtacgttacatttctatattgcaaatcgccataaaaactaagtttttctgttaactgataattggctttcgcgaagatatttccatctgttttggttgaaaaatcatcatagtaatgatctcccggcagcgcctgagcagaatttctggcccagattactttaccaaaatgagctccctcatatttattccagccaccgcctacgattacgtctaatttttcttctttatattttacagaaaaagtggtcccgtaaaaatcgttgtctaaccatttctgacgaattaaatcagttcccggaactaattctccaaggtcattttctaccattttagtaggctgaatcggcccataccctttaattggctcgttatatttgaagttttcgtagtatccttgccctttagtgtaatgaagagctaagttgctgctccatttatcagaaattgattcactccaatgcaattgataatggttttgtttgtaattatcggtttcattatcataaaaatgaacatttccggcttcatctttatattttccggctgaattataagtacgatctgaatttagtttttcagcatcaattccgttccaggactggtatgttctttcagttccaccaaaaaccagcgccttaattaaagttgttttaccaatataagttccctgaagaaaatacgattttaaatctgaacttgcacgatctacatatccatctgatttaatggtagacaaacgtcctgcgagctcaaaatgatcatttagtaaacctgtactgaattttacggtatttttatttgaattgaaacttccataagagcttgaaatttctccggttgctttcgtagcataattatccgtcagcatattcaaactcgctccaaaagcagaagaaccattagtagaagttccaacacctctttgcaattgtaaactctccacagaagaagcaaaatcaggcatatttacccaaaaggttccctgactttcagcatcattatatggaattccgttaatggtcacatttactcttgtagcatcactaccacgcaccctgattccggtgtatcctatacctcctcctgcatcagaagtagttaccaccgatggcaaataattcattagaattggaatatcctgtcccaggtttctaaatttaatgtcctttttatcaagattactaaaacttaccggagttttagcagtaacacgaactgccgaaactaaaacatcatccagtttattcactttagtagagtcctgcccttgcgcgaaagaaaattgagaaaagaaaatagaaaaaagaagtaagaaaatagatttggttctgctcgacttttgaatcttagaacctttgtaacttagcacctcagcacctttaaaaatagttttcatccgtaaaaaatttacgaataaaagggggaattattctttttgttaaattaataaaagtttcacgacaaaatatagtgtgcacgctaaaatttgtcgtttttcccttagcaacattactcgctcaggttctttgggtatgatctcagctcgttatttagagcacccctttgagacgatgcaaatgtaatgttaaaaatttcaaaaatcaatagtaatatcaaaattcaaaatctcaaattccattttaaactgatctttttttttcaggaatttggaatttctacttaatcgatatttggtttctttctggattgtttgatttccgaaacgttctttttatccttgatacgctttttaattaccgatttaggaattttagtggctttacgaactttaggaacatacagcccttttttaattacctctaaaaagcgttttataacaatatctttgttttttagctgacttctatcttcatcgcaatttaaaatcaacatattttctgtggttaaacgcgctgcgatattcttttgcaaaagcagcttttcttcttcagacagtgcctgagacacattcaaatcaaaagtcaacaccacttttgatgacactttgtttacattttgtccgcccgcaccactgcttcgtacggctttaaaacgcaactctgatatgattttttcgatatccattattgtggctgatgtgcagcttttaataaatcgtttactgttttcaccggattaaaggtaattaagggtactgccacaaaaacagtaagccaattggccattgctccgttccaaagtcccggaagctcataactctttaccaatttcccatccacacttttttcgacaataaaaccagtgttttgatctacaaattgcagtaaatcaaatttttcgtttttataatttttgattccgcaaactaaatcaacaggattaaaatgagtggccgaagccaagatttcctgttgtttcttgtttgtgagatcgatttgcgaagcctctacaatctgcaacgaaactgatcctttggggctcactacccaaaacggacctcctccgggctctccttcatttttcaccattccgcaaacacgaattggcctgtctaataagctttttatcttattgattttattttcgaaagtaaacttactatagtcactattcaactcaacattaagttcttttgataaaaagatcacgatttcttcaagatctttctctcgtatctctcctttttcaattgcatttaaataactaaaaactttttgctgtatcttaattaaagtccctgctaatgcttttttatacaatgcaatctgatccatatgattttgaattacattgtcaatgtttttgacaaaaataacatccgcatcaagttcatttaaattctcaattagcgcaccatgtcctccgggtctaaaaactaatttattgtttttatcccgaattggattatttttaacgtctacacaaatagaatcggtacttttattttgataggaataagagatgtctattttaactcccgaatctttttctattttttctttaagaacctttatttgattctcaaacaaactttgatgtgcttctgaaacggtaaaatgcaaattagaaatctgattggatgaagcatagcgaatacattcgttcaaatgttcttcgattggatttgcaatatgtcttttgtattgatgaaaaggtaaaactgcctttggtttatttgcaaaatcaaagtaatcaacagacaacaatgtttttataaaataataatttttatgatcccgatccagcatttcaaactctgggtagatttcttttaactttttatcaaccgctttaaaaaatgcaaatttctccatagccactataaaaatagacagctctttatcgtttttacggttgatataagcgttgatagtttctttctgaatgtcaaactcattcagaaaagcgcttaaaaatttaaacattctgctggctgcacccgaagccggaacaaactttttcagcttaatttctgattttttaagatcaaaaaaagctgctttttcttcaaattctgcttctgataaacttaatacaccactgtcaattgtggccggactaatcaaattagacttgtttattccgttcttaaaattttgcagttgctgtaaaatcttttcaaaagaaattccatgttcgtatatctgaacaaaatcttcagatgaaataccgtgctgttttgcgacagctaattgctctatgatcgctatcgctttagtcaaacggctttctttatctccggaaagagtaataaaaggttttttagtatcaataagagtctgtttgaaaactgaaaatacggtttcacgaccttcaggagtatctctaatgtcatctttttcccaggggatatcaatatcagtcaggaaaaataaatcgtattcatgctctaatgctgcttcgtttaaaagcggatcacaaaatccataatacatttcagagaaaacctttgtcaccattaaattggtatcacaaaacagatacttacttgacaaagcctgcttttgattttcaagagctacttgcccgtatgcaataggcatcatatcatcggctacacaaatgtgctggttctcttcccatttttcctgcaaataatcgcgtgcgaactcaggaacccattcggtttcataatattctgcaagttgttttgccaaggtagtttttcctgtgctttcaggaccaaataaagcaatttttatgatagctgttatttgctgtctaagatttttctccattctaaataagctgaaatagccaaaattgtaaaaattaaatactgcagtgataacatccctaaaccgcgataagcgtaaaggggcaccacaataatatcaccaatgatccaaagcgtccagttctctatctttttcttcgccatgtaccacattcctgcaaaaaatattccagatgaaatcatatcgacataattgtcgtttctaatttcgtaatcaaagtatttatagatgccgaaaactacaaaaacagttataaaaaacaatgctattccaattattttttcattggcatttgttcgtgttataggcaaattgtcttcaaccgttcctcctttgctccatacataccatccatatatactcataatcgaaaaatagccgttgatgatcatatctccgatataacccgcaacatataacagataaaccgaaataacggtagcaatcaaaccggttggataaacccagatattttcttttttcgcaaaccacacactcaaaattccacagataaaaactaaaaactccacggcaatatgccataaaggagtgtttttataactgtccagaaaaaaatcaatcatacttgagcaggttagtttaggttgggtttttatttatgattcaaaaaaatggctgtcattttcaaaagcagttccaataactactaaatcagcaccggcattatatgccttttgaattccatgcaaatctacaattcctccaccaacaattataggaatctcaacattttgagcaattagccgtatcatttctaggggcactgctttttttgcaccacttcccgcctccagataaatcaattggcttcctaacatttctcctgcctgcgctgttgccaaaaccagatcaaaattatccctttccagtggttttgttttgcttacacgggctacagcagtttcattgccactttcaatcagaatataacctgtcgaaataacttctaaatttgtcttttttaaaattggagctgcctgaacctgatactctattaaataatcagggtttcggcctgataataaagataagaacaaaatcgcgtctgcctgaggtgaaatctgcgaaggatcacccggaaatataacaacgggtaaattggtttcttgttttaatttagatattaaatcttctaaaattgttgcctgcacaatacttcctcctacaaaaatatgtgttgcgggagattgatttattttaagcaataaatgatctaaattttcccaaacaattttatccggatctaataatatggccagtaatttttgtcctttacttttagcctctaaaatttcctgtcgtaaactgagtaatttttgtatcatagtgggcgtaaaagtaaaagttttttgatgtagaagaactattttgaatgaattatatttgtgttatagttaaacaaaattatgattgcaattgatctgctgcagaaatatggtgctttgagaaagtctttcgctaaaaatgaaattatttttgaagaaaacaatctgcccgcgcactattatcagattgtttccggagaagtaaaaatgagtaattataacgatgacggacgtgaatttattcagggtattttttacaaagaacagccttttggagaacctcctttatttttaaatcaaaaatatccggcaaatgccattactgttgaagattcggaaatccttcttcttaacagaaatagtttcatgaaactgctaggggaaaatccggacatcagtcttaaaataatcgaaaatctggcgcagcgactgtactataaatcggttatggcggcagagatgtctactcaggagccggagcatcgcattttaaaactaatcgatcatggaattgtctatttcaattttaaaaaagacgcaaatggatacctcatcaattttacaagacaacagattggagatctgaccggtttgcgtgttgaaacggtcatcagaaccataaaaactctggagaaaaaaggttttttaaaaatcataaacagaaaagtataccgataaaatagttcagtttatatgatttaaatcataaaatgcatccctatagtgcctgtacctttgtagtataaaaatctcaatatcatgacactatatcaaacaacattcgaaaatttcaataaaaactatatgggttcagctgcaatggcggtaattggtcaaagctgcttaggtggtgctgcggccatgtacgttctggctaacggaacctcaataccacaaatgatacaattggccattattgttttggcctgtgtctttgccaacacttctatattggcacaaatgaagcataaaacggtttttaaccttattattgcaagtgcacttttaagtgtgttttttattcttttaaatagttttattctatgaaaaaacaaatagagaatcgagaagatgtcgaatttttagtccatcagttttatgctaaaataagagccgataatgaaatcgccttttatttcaattctatgatcaaagattgggatacgcatttagagaagctcaccgatttttgggaaagtaacttatttgccgtaaggaaatataatggtaatccgcttgccgtgcacaatgaagtcgattcgcattttgaaggaagaatcacctctaatgagtttggaatctggctgaatcattggtttcagactttagaagaacattttgaaggcgaaaatgtcgaaacgttaaaacgacgcgcccgtaaaatgggaacttttttgtttctgagtatgtttgaaaatcgaaaaaaaatagcagaagctagcgctgaataaattgctttttttgtgattacgagactctagagaaatgacaaaactgtaaaaaactgaaaactgagactgaaaactacttatcaaaagcataaaccaaagtaaagttctgccctgaagtattcgatttaatttctttatagtacacgtcaaaatctactgcgagatcattaaaatgaagactggcttcggtttgatttttatctaacgaaaacgtatttacactaatatgatctttaaaactgattcctttttcgtttctgattttaaaaatagcttctttggctccccaaattactgtcaattccctgatataatcgggagtattttgagtgtctagataactgttttcggtctctacaaatttgtctgctattcgaaggattttgtcgcgttgcagctccatgtcgattcctactgttttatcactaattataatcgctgcaaaatcatgtgaatgcgtgatggagatatgattttcgcaattgaaatagggcttcccaaattcgtcgtagtgcaagtcctgatctgtaaaacccatttcctggatcagcatacggacgctcaaaaaggcgcgttgatgcattacagatttcatcccgttcaacctcaactgtgttttctcttttaatactacattgctcactaactcctcaaatgattctgttatgtgccaaactaagattttagtcgtttcgttgaattgtatggtttcaaataaaggcattcttttttaattatgagttatgagtttttagctatgagttgttttcctgatttgaaaacgaagtttcttatttaatgtctcgtcttttagccctgatgggaacggcatccttttgcagtctcgttttttttacgagactgcaaaagatatagtggacagcaggattagcttcttatttcgactacgctccatataacagccatagtaatcaactaatattctaaagattaagaaattaaacatttcacaattctgacagaaagtagtctaaattaaaaacctattccgtaaatttgcaaaaattttacaattacaaatatactataaatgagtactacaactacgccttttgtggctttcaaagtaaaagacatctctctagcggcttggggaagaaaagaaattgaattggctgaagctgaaatgccaggtttaatggcgcttcgtgctgaatataaagacgaacaacctttaaagggtgctcgtattgcaggatgtttacacatgacgattcaaactgctgttttgatcgaaactttaattgctcttggtgctgaagttacctggtcttcttgtaacattttctccactcaggatcaggctgctgctgctattgctgctgcaggaattcaggtttatgcctggaaaggtcttgatgagcaatcatttgactggtgtattgaacaaactttattctttggtgaagacagaaaaccattgaacatgatccttgatgatggtggagatttaacaaatatggttattgaccgtttccctgaattggttcctggaattaaaggtttatctgaagaaacgactactggtgttcacagactttacgaaagagtaaaagccggaactttaccaatgcctgcaattaacattaacgactctgttactaaatctaaatttgataacaaatacggttgtaaagaatctgctgttgatgctgttcgtcgtgcaactgacttaatgttggctggaaaaagagttgtagtttgtggatatggtgatgttggaaaaggaactgctgcttctttcagaggtgcaggatctattgtaacggttaccgaaattgatccaatttgtgctttacaagctgcaatggacggttatgaagttaaaaaattaaacactgtaattgctaatgctgatatcatcattactactacaggaaataaagatatcgttcttggagagcacttcgagcaaatgaaagacaaaactgttgtttgtaacatcggacactttgataatgaaatcgatatggcttggttgaacaaaaaccacggtgcttctaaaatcgaaatcaaaccacaagttgacaaatatactatcgccggaaaagacatcatcattttggctgaagggcgtttagtaaacctaggttgtgctacaggtcacccaagttttgtgatgagtaattcattcaccaaccagactttggctcaaatcgaattatggaacaacagtgctgcttacaacaatgacgtttatatgttaccaaaacatttagatgaaaaagtagcggccctacacttagctaaattaggagttgagttggaagttcttcgcgaagatcaggctgcttatattggtgttgaagttcaaggtccattcaaaccagaatactacagatactaaataattttagattgaagatttctaattttagattccttcaattgcctattaaaacccgacagatttaaaaatctgtcgggttttgtttttaaaaaccttagaagacaaaagatctttttatatttgaacaaaacattttcttaaaactttactttttaaaaataagcccttaattttaaccacaaaataagccttagtttctcaactacttaaacaacgtaattttgaaaaaaacaccttatttctttatcttattttttttacttacaatctctcagattggtctttcgcaggaaaagaaacctaaagtcgttttagtattaagtggtggtggagcaaagggaattgcacatattccgcttttacaaaaactggattctctacacattgtgcctgatcttattgttggaaatagtatgggaagtatcattggcggtttatatgccatgggatattccggcgatagtatcgaaaaaatcaccaagaatatttattgggacaaactccttggcggaggtcaatcattacaatctgtaagtgcagaagaaaaaagagaattccaaagatacttggtcggaatagggattaaagatggaaaactcaatagtgttggttcacttttaaatgatcaaaacctaagagaatccctttctgaattgacctttcctgtatataatgtcagagattttgatagcctcccgataccttttagagctatggctaccgacttagttgaaggcaaggaagttattttaagcaaaggcagtttagcttatgccatgcgagccagcatgtctttgcctgctattttcaaaccagtgccttacgaaaaaaccatattagtagacggaggagtattaaataatttcccgacagatgtggccaaacaaatgggtgccgacattattattggcagtgatgttggtggaggaatgcagccaatggggaaactgaacaatattatgatgatattaatgcagacgagtatgtttccgagtaatgttaaaaacccggcaaatcgcgatctgtgtaccatattaatcgatcacatgcccaacctgcgtttctcgacagctgactttgcagctagtaacgaaatttataaagacggtaaaatagccgcaaatcaaaatcttccggctttaattgctttagcagaaaagttaaaaggattccagcaacgaacgcacaaattgccctatatgcccaaagaatttgttcttgacaccataatttataaaaaaataagtccggaaaatctccctctggtagtgggaagagcaaatcttaaaccccatgtaaaatatacctccaaagatttaatttcaggcatcaacagagctatgggtacgaatctttttgatgaaattggatatagctatttcatcaaagatggtgataaacccggagttacattatttggatctgagcgtgctaaaaaccagctaaacacctccgtacactacgacacttatagaggtgttggtgttatttttaactacaccgccagaaacgttcttgccgatgcttcccgtcttttggttactgccgatatagcagaacaaccaaaaggcagaatcaattttcagaaaaattttggaggacgcagagaatggtggtggggaacggaactttacggagcttttctaaaacaggaaatttatcttaatggcaaagcctcagataatatcctttacaatacatttgaatttaacaatgaagtaaacagaaatttaaattcgctgaaaagctattttggttttggtttaaactatcactacacctacttcaaaccaaaatatgaacgggaatacaatccgaacgtagtttcactaaacaactacagctctaataatatcgaattcaacatgcattattcctataatgatatggataaagttttctttgctacaaacggaaccattataaaatcaaatataacgcgatcattccttagcgatatcaacgcctcaatttcctccccagatgtcatgcgtctttccggctcaacaaataattacacaaaatttggtttaagcgttgaaaagaggttgcccataaaaaagaaaattacaggaatcgtaggatttgatgcttgttttatttttcaagatcaactcaaagacaatcaaatttcgtttttcgattttggttatgcaacaagatattttctcggtggtattatcccaagttccggcagtaatcgcttttcattcccgggtttacatgaagacgaactcaatgttacacaatatatggggcttaaactcgcctcgcaaataaatattaccggaaaaatctatctgacccctcacattaatattgcctctgtaggttttgacacttttggtaatttcatcgaccatgcctttaaaccaaaaggaaattgggatcataatttcgaaaccagccttgtgctatcgggaggagctgctatttcctatcagtccattttaggtccaattcactttgatacttcatggatcaataatatcgacaaagtccgattgtttttcagtgtcggattatcacttaatccataacacaccaataatctcaaatagctttcaaatccgacaggtttttaaaaacctgtcggattttgtttttaatactacttcttattcatagacaaaaattcgctcaacaaaattggcttctggtttttctgaacccagtccgccctcaaaaaacatttcggtccagtttttttgattatcgattttaagatactctaattttgtatccaacttaattttaccatccccaaaaaaagaatcggaacttgattcttcaattcttctattatcggagttgtattttctataaattaccatttcattcaaatacacagaatcctctttattattcttcaaatgttcttctataagatttcctctttcatcgtacaccaatacatcctcagactccgtaatttgtgcttctcctccctgataatcataagaaaaacttgtttttataatttgatttttatcgtatttatatttcaccaaactccttaaagtatcattctccgaaaaataacttttctcttctactaattttttatccggtccgtagctgtaaattgttcttccggtaatcttttcatcatcgtcgtaacctatcgattctatcttttgttttaagctattatacttgttctccggataatcagactttttgggaaataatttatcttcgacaaactccccattagaattctttttataagtggtataattttgcattttaccttttacatacttgccattcttttttgttgcatagtaaacgttctcggtatattctttaatgtttccgaatagtttttcattccaatctgcagataattgtggggcattgtaatcttctgtcctcatttttttaggctcaggctctttcagattcggaatcatctcaaaagacctgtttataccataaacaggttcataaagaatgaaatcatttttaattggagcaatagtctgaataaagatgtactttcttttttcatttattacctcatcgatcgtaaatgtttttttaaattcttcaaaactcatcgtaggggtggctttaaaagcctcaaaaacaggtttacttatattacctcttatatcactaagacctgctctttcatcattgatttttttatttttcttctttagatcttccatctccttttgaccgtaagtaatcaatacattgcccaactcatcataattcaccaagcgcatattaatttcctgatcactattcggatcgacagcctcaatcaaaatcacattgtttataacatccactaacttgtactcgttattattcagtttaaatgtgcttcctatatcttttttagaaagctttacctgggaataatctgtaatgaatttaatattgtaaactacacttccattaatctcagaaagttcgttattgtttttaaaatttacagcattgtttatctgatcctgcttccgcagcgtagtaaaatttaaattaatctcttttccgttcttgtatttgtacaaaacctccattccaaaagaagtcccaccaatatgctgaatttcaatcaactcttttttcgaattaaacagcttacttgttacggggtgaaagtctacaatagtagtttcatcattttctttaaaataagaaggaaaacgagaagtaaacaacaggtcgtatccatattcagatttctccaatttcaacactcctcttgaaataattgtatctatagaagagtttatcacctccatcgattgaattgcttttttttgaatttcatccatttttcgatttacttttttaaacggaaagtcaggagtcttaaaaatttctttatttatgttataagtcatttcataaatcatgtctttctcctctttactgggttgttttttttgagaaaacactgaaagactaaagctcaacaaaatcaatacaattctattcatctattttttctcgaaaagtactgcttttcctctcaactatccaaggtctatttttagaaaatgttattcttatctttactggaaatttgtctttatgaaacgatttcttgttttttgcctatacttttttactaattgtgttatactcgcacaaaaaaaagacctttgggtttcattttgggataaagacactacccatattggatttaaagacgcaaacggaactatcaaaataccaccaaagtttatgggattcactactgcccgtaaatttgacaaaattattgccgtaaccgaagaaaccggtgaaagctggaagagctattatctgaccaaatccggtaaaatagtgggacgtgacagtctctatatttttgacaatggtcctgattgtgaaaatgaaggttacatcagatttacagaccgaaaaacagataaaaccggaatatttaatagtgaaggcaaaattgcaattcctgctgatcatagtgctttatcaaaagttcaaaatggaatgattgtagccttaaaaggtgccctaaaaaaacaggacggtgaacattttttctggagtggaggaaaaagatacctgatagaccataacaacaaaatcttaattgaggatttcaaagacaatactgatcttaacttttattctttacaaaaatcaaaagtccctaataaagaagaaacaagagagaattttgccggcgttggcggtgcgtattattcttttattaattgcgataaggaatttaagtggtggttaaaaaacaatttactttctgatttatccaaagaaaatttaatgaagagctcctttgataaaatcacctactggaaagaaccaaatggatggaaaagcgaatcaaagacaaaatttattgaagaaaattatgctcttttaaaatcaaaacttcaacagcttaaagcttccggaacggattattttatttcgtctgatgggttgaatccctttatttttgaaacgagcgaatatggtgagtactttaataattgtaatgagcctaaagaatggatctatcccgttaagaacattattattaattcaagcgatacagccgattttaaacaggatcattttgaatttctccgaaccgaaaagggttacaaactgataagtgtttctgttgcgaaagaggagctgaaataacttaaaattttcaaatctaaaatagctgaaatacctttttattttgcaggttaattctgaaatatatcaatacatttgccgcagaataaaacgaataaccaaacctaaaaaaataagattttaaaatgaaaatacaattacttactactagtttgctcctacttattacaacagtttctttctctcaaaaaatatccgttagtgagatcaatgaaaaaagatctacatcagataattcatttagcaacgaatgtgaaattgaactaaaaatatccggggatgaagtacgaaaatacaagtttgtaaaaattagtaagatcactaaagcaatagacgatcaaggtatagatttattaaatgaagatgaaaaaagtaatgattatagtaaaatagatcaaacagctaaaattaaactagaaattaaaatccctgccagaaaagctaaaactatcaaggaactgagcggcgaagtgagtctatataacccaaatcaggccaatggaagtgaaataaaaattgccaattatcaaaacaaaacgaatgtcaatcttttacctggcaaatccggaatagagattatttacttaacaaaagaatcttatacaaaatatgttcaggaaaataagaacaaaaaagaagaagaactaaaaaaacttcctgaagctgcaaggctaatggctcagggacttttaggtgccttcgatggtctttttagctctggcgacactgatgataatcaagtgtacttctatgtaaatggagataaatctaaatttgtcgatttatatttcgaagatacagctggaaaaaaaatagaacgaaatggaagtatgagcagtaacagtttgtttacttattattttgaagaaaaaccaaaccctaactggaaattagtcattaatatcgaaagcgataaatccataaaaaagatcccttttaaactagttgatattgaattgccgtaatttaaaaatacaattagtttttctatactattccgtaaattcatcttttcacgtcaatacaaaggttaactttacaaaaaaacgagatatgaaaaactttttctttttaggcattgctattctctttgaaatcatagctacttcggccctaaaaaagtctgaagaatttacaaaactgattccaagtattgtaaccataattggttactgtggtgcattttattttttaagttttgccatcagaaccattccggtcggaattgcttatgccatctggtcgggagttgggattgtactgatcaccattatcggtgctgttttcttcaaacaaatccctgatttaccagcgataattggattaacattgattatggcaggtgttattgtcattaatgttttttctaaaactaccgcgcattaaggtattttaaatcaatcattgatactatcaaatgacattataaaaacactccttacactataaatcaaaaatttaatgaatttcagaaaagcaacaatttcagacttaatggaaatgcagcaattgtataccgaaaccatacaatcggtctgtaaaaacgattacgatccaaagcaaattgaagtatggatttcgggtgtacaaaataccgagcgttggctagacgttattcaaacacaatttgttttgctggccatcattgaaactaaaatagttggttttggaactttgaagaacggcaattatattgatttcttttatatccacaaagactatcaaaaacagggaattgcccataagcttttaaatgaattgctacttgaagcccaaaagcaacatccagaaaccattacctccgacattagtattacagccagacctttttttgaaaaaagcggttttgttgtaaaagccgagcaggtaaacattcgatccggtgttgagctgattaattacaaaatggaaaaagaattgtaacggtaattgtttcaggtttcaagtttcaggtttcaggtttcaagtttcaggtttcaggtttcaggtttcaggtttgagcagaatgtgaaacttgaaacttgaaacaaagtcaacaaaagttacttccgcaagtttcggattttatacccgcaaaaacgtgtcgatatttgccttataaaatgaaacgaagatgaacacacaggaaaacattaattataatcgaattgctgaagcgattgattatatcaaagccaattttaaagcgcagcccaatcttgatgaagttgccgaaaaagtgcatttaagtccttttcactttcaacgtttgtttaccgaatgggcaggcacaagtccgaagaagtttttgcaatacataagtgttgaacatgccaagaaaatacttcaggaagaccaccaggctactttatttgatgctgcttttgacaccggtctttcgggaaccagccgtttgcatgacttgtttgtaaacatcgaaggtatgacaccagccgaatataaaaatggaggaaagaacttagaaattaacttcagtttcgccgaaagtccgtttggaaatatcattgtagcctcaacacttaaaggagtttgttttatggcttttgccgaaaacgaaggaatgggttttgagaatttaaaacagaaattccccaacgccacattctgcagaaagctggatctgatacaacaaaatgcattgtttatttttcaaaatgactggagcaaattatccgaaattaaactgcacttaaaaggcacccattttcaattgaaagtttgggaaactcttttaaaaatcccaatgggacaactttctacttatggttcaatcgcacagcaaattgagaagcccaatgcttcccgtgccgttggtaccgctatcggaagcaaccctgtcgcttttttaattccttgccaccgtgtaatccaatccacaggaaccttcgggggatatatgtggggaaatacccgtaaaacggccattattggatgggaaggcgcacagataaatccataaataccttattatttttccgccacaaattcacgaatcattcttttacatttaaaaaaaatctatactgtagaataagtttaattcgtgaattacttcgtccggtcgctatcgctcgggccgtggcaaaaaacaacctcaacttaaaatcatgatgcaaaacatatccacaaaaattgcttcccttcattgggacagcatcaccgaatctatgcacgaaaacggattcgccattatttcaaatctgttagataacgaacaatgtgaagctctaaaagccgattattcaaagtccgaattataccgaaaaacggtcgtcatggaacgctatcgctttggtctgggggagtacaaatacttcacttatcccttacccgatctgattcagaacattcgtacttccatttaccctaaactcgctcctatcgcaaacgcctggatgaaagcacttactattcagaccgtttttccggatacgcatcaggaattactggaacaatgccatgccaatcatcaattaaaggcaactgttttaatcttaaaatatggtaaaagcggtttcaatacactgcatcaggatttgtacggagatgtttattttccaattcagattgttcttttcctgaacgaacccgatgaagattttacaggcggggaatttgtactgacacagcaaacaccaagagcacaatccaaagctattgtactgaaacctaaaaaaggagacgttttagtttttaccaccaatttcagacctgtgaaaggttccaaaggatactatcgcgtaaacatgaaacatggtgtaagcgagattcattctggcgaacgacatacgttgggaattatttttcatgatgcgctatcgtgagtatttttttctgccacggcccgagcgatagcgaccggacgaagtaattcacgaattatgttttttaaatctgtgcgtttatttattcgaattcattcaaataatatcagataaagcatgtaaaagaataattcgtgaattcgtggctaaaaaacaaaacacaaaacaatatgcttaaacataacaaaattcaagattcagatcttcgaaataaaattaaaaaaggcgaaatttgctttggtggcaaccaaaaactaaaaatctatggaacgctaaaatgcaaatccggaaaaagaatgaaacgcgaaaacagggttttcttttcaaccgaggacgaagccgtagaaaacaattttcgaccttgtggacattgcatgaaaaccgaatatcaaaactggaaaaatggacttatttaatccgcatacagacgaaacaacgaatctgcttcctaaagacggaacggttaattattatggaaaattgttttcgagagaagactccaatcattatctggaggttcttttaaatactattgaatggaaaaatgatgaggctgttatctttggtaaattgattttaaccaaacgaaaagtggcctggtatggtgattcaggttttgaatacacgtattccaataccaccaaaaaagcgcttgcatggactccggaattactagtactaaaagcggtgatggaagaaaaaacgggagagacctttaattcctgtttgctcaatttatatcattccggtgaggaaggaatggcctggcacagtgatgctgaaaaagatttaaaaaagaacggtgccattgcctcggtaagctttggcgctgaacgaaaatttgcctttaaacacaaggaaaccaaagaaactgtttctttaattttagaacacggaagtttactggttatgaaagatgctacccaaacgaattggctgcatcgtttacctcccacaaaaacgacttcaaaacccagagtaaatctgacgttcagaactattgtaacttaacagtacattctcacttctcactttttcttaaaagctacattttgataagaaagaatcaaagcgtcttcaaacatttccggtcttgcttttgaaagctctacaacggtccagccttgtttaccccacttattgggaaccggataaaaaatcaattcacttgaagcgcaaaaaacggactgatcgatttcgttcaattttaaaacggctgtattgttcttttcttcaaaagtggcaaatatttttttgttgattcgaaaagaagttttctcaaaatgaggctcttctgtggcgtccggaaatgacagcgcaagggttctgaatgtttcaattgtgaccatatttcactctttttttaaaatactattgctcaaaattggtaaagtcttgcctcttaccacccctgattcagtccgtttttaagaacctctttgtatttatctgtatcaaaagtatataagtttggggctttgtgcgccacattgcttttcttttcgtccagtttattcagaattccgatattggtaattttacgcagaaagtttcgtctgtctaattttcgatccaaaatcgtttcatacagcttttgcagctgtggaattgtaaatttttcgggcaacagattgtaacccaccggcattaaattcaactcgattctaagagtattcagggctttatccagaatttctctatgatccaggataagttcgggaacttctttatgatcgatccattctataatctcctgactgttttctttttgcggaactgcttttaaaaaatcgattaaggcataatacccaatggttataaaacgctgagtaaaccattttccatcttctctggaaatatcatagtgatccagtacggcattcccaaaatccagatcgtttcgtttgacgcggccaaaagtagcaaactgtcttaaaaaaatcccctgcattccggtacgttcctttaaaacggtcacggctgcggtgtcaatatcttcttcaatgggtataaatcctccgggcaaggaccatttttcatcaaatggagttttaatgagtaaaacttttagctgattgtcatgaaatccaaaaatgacacagtcaattgaaagtccgggctggtaattttcgctattttctattatcttttttggcatttaacgtttcttaaatcagcatgctgttctttaatatacctgcaatttaatgcatttttataaatccggaacatttttgcaaaaatgagcttctgttttgataagaattctttaaaaaaactcccaggttaactatcacaatttttacttaaaatgaaaatcgaattaaaaaaataattacattgcgtcataataacacatttaaaaaacgttttgttattttcacaacaaaaacacactgtaaatcagcatactatttaccgtttttaatccaacaggaacgcagaactttaatgcaggagatatgattaccaatccgttaaaagacatcaataaaaaaataagaaataaaatctggacttctttcgggtttgtttctaagacttatcttcttgaagcttctttaaaatatagtgaagagcaggaaagaatttttaacgaaatgattgttgaaacggaatccaaagataaaaaagcaaaaagcgaagcttatgacaaggcgttatatgcttcttacaaaggaattggcgccatggattttatcaacactgttttaaaataattctccttcaattatttgactatttaagttcaatacaaaagtttcctttattttattcttcgcaataaaaacgaggtggtttatcccttaatttctcttattacttttggaattcattttcctaatttccttaattctttcagaccttttttaaattatttaaggtgatatttcttcaaaatcaaataataaatttatttattgtaagaaaactgaacttatcctaataatacattcggtccctttagatatagacaaaaagctatatttttgttataaaccgaagattttacctacttcatttaaaagccttattatggaacaagatatccagtcagaaatttacaaaattcaaaagcctgaaccgtgggcaagtgaccttaatgacaaccagcttatagattatatcaaagaatctgaattctctcaaaaacaagcagacgagggacgtgactattgttattttttagataaaatttattataccaatgataacgaaagcagcgaatatgcttgtgtggcctatactttaaatgagcctgccaatttggagaaagcttctgctgtggatgttgtgttggaagaaagtgaaacttatgtgatacaccgaatcagtgttttaagagacggtgttttagtagacaaaattcccgatactaaagttaaaatactggacagcgaaaatcaaagtggtggcggtgttttaagcagtaacaaaaagattaatattacgataaaggatcttcggttgtatgatattttgattatggaagattccagaattaaaatatttaccgagcgtgattttctacgcaaagaattctccagatatgtttgggtaggtcctgacagttactgggcgtatggaaagtacaaattcacttttatcaacgatcgcgaaaaggcagttgcttacaaaaaatcgttctttagagatgaagacggaaatgtactggaaccacagacagcttatttgcaaaagggggaaaaatatgtaagagaagaagagaattacatcaattttgtagattcaaaccgtgaggtttcttcgtttatagattttgccacggctgccgactggaaagaattatccaattacatctctcctatttatgagactattttcgaaaaatcttctttagcagaatttgctccggaactggttgaaaaactggacaaaataggttctaaagacgatcagttgcaatttgctatagaatatgttcaaaaccatatcaattatatttacaatgccgatgaaatgaatggccacaagccacaggagcctgctgtaacgtttactaacaaacaaggcgactgcaaggctaaatcggttttactaaaagttattttagattatattggtattgattcttcgattattctggtcaatttcggtactgatttttatatcaagcattacttaccgtcgttactgacttttaatcacgtaattgtaaagatcaattacaagggtgaaagctactttgttgatgccacattgcgtgatgaatttggactgattgaaaatcgtggttttattttcttcctgcattatctggaagtgaaacctaatttggaattacaacataaacctcctcatcgtttcccttattatgcacttgatgaaaaatcagagcttgttgccgagaacaatgttggtaaactgaaactaacgaccgtatacaaaggaaatcgtgccaacagcatgcgcaggtatttcaaaaacactaataaaagagagatcattgacagctggaacaatttctttttttataccttaaattatacgaatgacagaaacggaactgatcttcgaaagatttttaaagatgccgtaatcgaaattgtcagtgatgataaaaaactgaatgaatttaaaattgaatatcagactactattgaaaacccttatttctcagacgggaaaaacaatcgtttcctgatgtattttgactccaatattgtgaaaaacagagcaagggattttatgcataaagacatctctttctggcacaattttgacaatgagcgatatgaaatcactcttgtaacggatcaaaaaattgatgttagcgagaagtttacgatacaggaaagtacgatcaacaatgcttactttgattatgtgagccgtaaaaagatcaacaaaaacggaggaactatttacatcgactataaaccactgattaacttagaaattcctgaaaaagattttgaagatttcagggaggcccataacgaggtagccgacagtaattttggaattggggtagatattatagaagatggtttattgaacaagctgaaattcaatttcaaaaaattagtaaaataatcatacaaaaggaggttaattatagcctactgtctcaacacaaattacacgaatttgcacaaattttaatctgttaaccttgtttgtgaaattaattccacaaacaaattagtgataattcgtgcaattcgtgttattttttatacttgtgtcgacacggtaagctgtaatctatgttttgatgattggaatgctcaaattttaaacacatagaaacatagatttctattgctaaaagaggatgcaaaaaagaaataaatttctttcatcccgatacatcgggacgttttatttaaagtgaaacgccttttttagggatgcaacacctatgttactatgtgttaaaataaatgacaccaaaaaaaggaggaattgtagaccatatctaaacacaaattacacgaatttgcacaaattttaatacgttaaccttgtttgtgaaattaattacaccaacaaattagtgataattcgtgcaattcgtgttattttttatacttgtgtcgacacggtaagctgtaatctatgtttnnnnnnnnnnnnnnnnnnnnnnnnnnnnnnnnnnnnnnnnnnnnnnnnnnnnnnnnnnnnnnnnnnnnnnnnnnnnnnnnnnnnnnnnnnnnnnnnnnnntaaccttgtttgtgaaattaattacaccaacaaattagtgataattcgtgcaattcgtgttattttttataacagtaatctatacttctttttggttaaaaaagttaaagcaattcaaaatctgcttttaatttgaggtcagctgatgaagctccgatcatgacttcaaaatctcccggttctgctgtccattctaatttagtattgtagaacgaaagtttctctttgtcaatagtaaattcaattgttttagattctcctgcatttagttttactttttgaaaatctctcaattctaaaacgggtcttaccaccgatccgaatttgtcttttaaatacaattgcaccacttcttctcctgctatttttccaacatttgataattgaaaagaaactttaatagtttcgttgtttttcatttttactgctgacaatttcaaatcggaataattgaatttggtataactcaacccgtatccaaaaggaaatttaggagagtttttcagatcaatgtaggccgaaacatagtttttggcatcttcatctttagcgggtcttccggtactgaaatgattgtaataaattgggatctgccccacttctctcgggaaagtcatgggcaatttccccgatggattgtaatctccaaataaaacatcggcgatcgcattacctgcttcagttcccagccaccaggtgtaaacaattgccggaacatgatctgccgtccagttaaatataagaggtcttcctgcgtttaccagaactattaccggttttcctgttgcctgaattgcttttaccaaatcttcctgcacccccggcaaatgaagatcgcttcggctttttgcttcaccgctcatgtcacgtctttcaccaatactcaaaatcaccacatctgcctgttgggccgttgccactgcttctgcaaaaccgtctttgttatctccgtctacttcacagcctttggcataaagcagttttgtgtttttacccactttgctctgcaaaccatcccattgtgagacgatccatttattgtaatcaacctcgggtaattctactgaccaaaaccccatattttctttgtactctttcaccattggaccaatgaatgcaattgttttcaggtttttagacagcggtaatgtttcgttgtcgttctttaataaaacgatacttttcttagctacttcaagagctgcttttctgttttcagggttgtttaaagctttatcagctcttttttgatctgaatatcgataggggtcatcaaataatcccaattcaaatttcttgcgtaaaatacgtttcacggcatcatcaatcaagtctacagctactttcccttcttttactaattctgccaaatgatatcgatacgcattactttccatatccatatcacttccggctgtaatcgcggcaagtgctgcagcttttaaatctttagagtatccgtgtgctaccatttccccaatcgatccccagtctgaaactacgaatccctgaaagttccattttccttttaagatatcacgctgcaaatgcacatttgcggtagccggaattccgtttaagtcgttaaaagaattcataaaagtggctgcgccggcatctagagctgctttaaaaggaggcagataggtttctaaaagcatgcgttcactcatatctaccgagttgtagtctctgccgcccacagctgcgccataagctgcaaaatgttttacacaggccataaccgagttcagatctccgagtttatttccctgaaaacctttaactctggcataggcaattttagaacccagccaggtatcttctcctgctccttccatcactctcccccaacgcggatcacggccaatgtcgaccattggagcaaatgtccagtgaatcccacttgctgaagcctctgtcgctgcaactcttgctgccaattcaatagctgctaaatcccaactcgctgcttcggctaacggaattggaaaggtagttttgtacccatgaatgacatcctgaccaaataacaacggaatttttaaacgggactgcatggccagttcctgatattgtcgggtgtattttgttccggttacgtttaacatcgaacctattaatcctgcctttatttcggcttgtttgttggcatttatggtaataggccccgttgctgcattgtcgcccgtatactgatttaactgaccgattttttcctcaagagtcatttttttcaacagagcatttactttttgatctattgtttcctgctgagcggtcgcaaaaaacgataccatcaacagggtaaatgtggttatttttttcataattaatttatttggatcaaaacaggcaaatgatcggatggatattttaaatcttttgaatcacttaagactacatgtttttgaatttttaatccgctgtttttagatacaaaaatataatccagtaacaaattcacaggttcattgtgtttgaattcattaaaggttcctgaaggaccaaaaggtttttctatcgaaatatccctggtatcgtccatcatctttttgatctcgacaatttgtttcgtgtccggtactgaattgaagtctcccattaaaaacacgggatcatttttagtgtttattccctttatttttgagagaaccagctcgactccttttacgcgggctacctctccaacatgatcaagatgaaggttaaaaacccaaaacattttttttgtttttaaatctttaaacaatccataggtacaaactctgttacaggcagcatcccagccccttgatactttttccggtgtttcagacagccaaaatgtgtttgtatgttctacctgaaaacggtcttttttatagtaaatcgtacaggcttctccggttcctttttcttctctgcctatcccaaatttatggtactccggtaaggccgaagcaatctcagctacctgattaggcaatgcctcctgaattccaagaatatccggactgtaaaatctgatttgagaattaaaaaagtctttccggttggaccaggcattttctccgtcagaagcaacatctaaacgaatgttatacgtcatcaattttacactctgagcataaaatgaagcactaacaaaaatcagaaacattacgagagcaattgtgtttgtctttttcatagtaaaaaaattgattcgtaaagctaccatttcattaggctcaaagaaaaaaacaattgtaaaaagaatgttaatttaacccgttgcatttatttaaacacatagaaagtttgcagtcgcagttttcagtcacatttcacatctaacatttcacatttcacgcatctatttttttctcgcagatttcgcagattgcttcgcctgttcgctatcgctcgggtttgcagattttttttttaatcctttaagctgtatcggttacttaaattcatagattgcagtcgcatttcacatcccacatttcacacctatattttttctcgcagatcttgcagtttttttttaatccttttaatctgtggcggttatctaaacacataagtgctgcacgcataaaaaagacgtttcacttcatctaaatattcctattctcttataaacacctcgttctgcctttattttttctgttctgaaaaatcaagatagttcaaattgaaacctcctttttcgaaaacaactttaattttttgcattcctttatttagtaacactccggacagtacaaccgttttccatttgtcatttcctcccgttgcaggtaatgtaacgatttgggatctttttccattttctgcttcgagatgtattttcccttctgaattttcagccgaatatcgaatcgctactttgtatgtattttgcttttttacttcagctgtaaactgcaaccattctccatcctcaataaatgaaacctgatatccgtttgatccggcatctttgcagggtaaaatatccacgccatcatttcgcatcgtatttcctttattccactcgtcaaattttccggtttcgactctgtagtttataaaatctttgtctgaataagccttttcatttgttcccaaatcatactgtgttgctgcaatttttccgggaatcaaatgtcgtttataaggtttggtatcgttggtttgcacttgtctgaacatggcatcgatcacgtccggttttacggttacgttttccattttgtaattgtcggcgattttcattaaagtttttttggcaaaatcaggctttggtttctcaccgccgtctttccagtactttaataaaacatcatattcgggaatctttgtaacggaggtcactcccgcaatattctcgatttttttcatgggccagaatgcccagcctatattgttgttttcgaccaatgtcaatgcctctttgaaccatacgttcgaattttcaccgctttcacccaaccagatcggcacattgtattgtgttctgtagtccagcattttctgaatggaggctgtggtattgtagttccagtatttgtgaaaactcaatgccatattttcatcccataaaggaaaaattccgttgtaattgtttccccagcagtttccttcaataaaaattaaatggttggtatcgacttcccgaatggcttttgtaacccgaaccatcagctctcttaaaggaccgtttgagttttcatcacagccatttttattggttccggtaaaattccaattgggttcattgataatgtcataggctccaatccacggattatcccggtaacgtgacgccagtttttgccataaggcaatcatttttttctgattagcttcgctctcccacaaggagggttttgtggtatcataatccgaaattgcggcatcattaccttggcctcccggagcggcatgcaagtctaaaatcagatacattttattttcggcacaccatttcagcaaattatcggtcatggtaaagccttcttcaatccaggagatttcattctttttttctgcttcgatcggtggtgtgtataaattgtaatgcatcggcaggcggatcgaattgaatccccaggcggctaatgaatctacatctcttttggtgattccgtttgctttgtaggcagcgtaaaattccttggttgcttcttctccaataacatcctgaatcttctgcctgatgacatactgtggacttgcgaaaggctgtgtctgtaacatatagccttcctgaaccatccagcctcctgttccgagacctcttaaaatgatattctttccggttccgtctacaattttttgtccttctctgtgtaaaaaaccctgagcgaaagtggcaaaggaaagtaataacggtagggtaataattatttttttcatgtctctataatatgaaatagctaattttcttttgacattccaacaccaaatatctttgcggaaataacgatgtttattttctttgctttaacccgttgggtgaaattgaacaaaatttaattttaacacatagaaacataggtagtactaccccaaaaaagaaggcaaagtagaaatatctttcttccacatagttatgtgctttttaactagtgaaacgccttttttaagtctacaaagactatgactctatgtgttaaaacaatctctcccaacgggttactttaataaaaagtcctttttaagatttgcgatctgaattgtaaaagttcctttttcggaaatccatttcagatcttcgtttacgaattgcaaatctttttggtttaaagtaaattttaccgttttggtttcgttaggctctaaactaatcttttcgaatctttttagcgcttttacttcaggagttatagaagcataatgatctgacaggtacaataaaaccgattcttttccggctctttttccggaattggtaacctcaacagtcacctttatttcatcggtattcgtaatttctgctttgtcgatttttaaattcgaataagtaaagttagtataggataatcctgttccaaattcaaactgaggggaataacttttctcgtatttagcatcattattttgttcttcatctgccaaactctctgtatgttttctgttgtatttttctaatgaattagggtatctcggatagttgtaaggcaatctcccacttggatttacctctccgtacagaatgtcaaccaaggctcttcctccttcatttcccggcaaataacactgtacaacggcactcattttatcttcgaaatcactgattaatcttggtcttccttcgtttaaaaccagaataattggtttgtttactttggctaaggcgagggctaattttacctgagatttactcatataaagattactgatatctcccggagtttcggtgtagtttttctctcccagacacaatacaattttcgatgccttttgagccagttcaaccgctttttgaatttcggcatcatcttctttttcaatatctgctccggcagtatagagtacattctcttttcctaatttagcctgaaaagcttccagaatagttaatttgtcagcagcataagtatctgcattttcaccctgccaggtgtacgaccagcctccattcaggtttttcatgctgtttgccgttgctccggttaccaggattttttcctctttgcttaaaggtaaaactgcattgttattttttaacaatgtaatggattccgccgccgttttataagcttcctgaatgtgttcggctgaaccaaattttggataatcttttagatttgcaactgtattctgaaacaggtttaactcgaatttcattctcagaattctggttaccgcatcatcaatacgggacattggcacttctcctttttgaactaaatctacaaggtctgtgtaaaaagtaaattcttcgggtaccatgctcatgtctattccggccataaccgcgatacgaaccgcatctcttttggttgctgcaattttatgtctggtattcaaataaataatatccttccaatccgttactaccactccttcaaagcctaattcttttttaagaatgtccgtaatcagatgtttgctggagtgcaccggagttccgttgatttctccggaacttaccattacgctttttgctccggcttttatggcagcctgatatatggttaaatcatattgtcttagaatgcgctcgggaataatacttggggttctgtcttttccggttgtagtgctgccataaccaatataatgtttcatacaggaggctacgctatattttgatcctacattgcttccttcaaagccatctaccaaagcaacggccattttggaagacaaataggcatcttctccaaaagattcccacattctggaccaggccgggtttctcggaaaatctaaatccggagagaatacccatggaatggaggaggctctggtttcgtaagccgagatttcagcaccgcgttttaccagctctgtattaaacgttgccgccagaccaatttgttgtggaaataaggtggctccggcggtataactcgctccgtgtatggcatctataccatacaatactggaattttaagtctcgatttgttggcttcattggtaatggcggtcatagtctcctgccatctctgaagtgttggtgctcccggattgggcacattcagaatggaaccaatatggtactcctgaattcctttttttagtttggcggcatcaaaataacccggtttttgagcatcttcaaaaacagtaactgttatctgcgtcatttgccctactttttcttccaatgtcatctttgataacaactctgaaaccttagcatctatatctgctctcgttttcctggcttcctgactccatactgctccacaaaaaaatagagcaactactataaacttcgtgtttttcattgtatttctttaaattaatatgctgctaaaagaggctaatacactagcgtttgcatggcatgagccggtatagtaagcgtttttttcaccgcattgattgctatttcgtataccactgctttgtctgactgattcattacaacggtggcaatttttccgtttgtatttagaaaagaagtgcttaatacacttttgtcgctcattacatttctaattcttttcgctcccggttggatgaattttgaaaaatgtccaatataatagtacatcggtgtgtagatcagttcttcttttgtggtatcggcatgaattggggcaaaacaaaagttaccaacatgattggggcctccgttttgatccagcaaaatgttccagtccgtccagcctgtcgttccgttgttaaaatcatggatcatattgattccgtatcgttcggcatttccccaaaactggaatttcgaagcgtcaaatttttcgatacagccttcggtaaacagcaggtttttgtttggaaaagcttcatgcactttccctacagattcaaatttcggactgcctccgttccaggtttcgtaccaatggaatccaattccccaggcgtatttggaaacttcgggatcagaaaaaactaaattagctcttttctcgagcatctctccgcggttgtggtcccaaataatgatctttttagatcccaatccttcttttcctaaagtaggccccagaaagtttttcaaaaaatctctttcggcttccggactgtaaatacaagattcccatctctgacttgccattggttcgttctgaatcgtcagtccccagaccggaattccttctttttcgtatgcttttataaatttagcataataattggcccatgattgtgcaaactccggcaataaaacgcctccatgtaaaatatcattattgtctttcatgaaagccggaggactccacggactaacaaataacgttaatttcccaccggctgttgcaattgcttttttgagtaatgggattcggtattttttatcgtgatcaatagtaaagttttttagctctttgtcgccttcctgaatataggtataactttcgctgctaaaatcacagctatgcatattggttctggccaaagaataccctattcctttatttttatcgtagtaagcggttagaaattcctgttgctttttgggtgacagtttagcaaaaacttctgcgctggcatcggtaatggctccgccgatccccaaaaaagtctgatctgtttttgaaggatcaatcgtaattgaaaccgttgattttgtttgttgtgaaactgaatttaaaatgaaattattggataatgacaatcttaattgggtgttttcggcagtagtatatacttgtatttttgggtttgatttaaatgagggtactacagactgcgctccaacttttgaagaagaaacgaattgcagcactagtaatggggcgattaaaactctatttatggctttcatggtacactcaaagcgatttcattattattaaaaggcaaggggcgaaacggacgaatcagattgcccctctaactaactcacaaaatttcaatagaccagcgtttgtatcgcgtgtgcaggaatttttacaatggtctgttctgttgcaataataaaattataggtaatagcattgtcggtattgttcatcactacagtcgccatttttccgtcagtattcaaaaaagaggtacttgacaaataactgcggcttaccgaagtacttacccgaacggcattcggacgaatgaattttgaaaaatgtccgatataataatacgatggggtgtaaatgagttcccctgtagtggtatctgcatgtataggtgcgaagcaaaaattgcctacgtggttcggtcctccaaattggtccaaaagtatgttccagtctgtccagcccacggttccattattaaaatcattgatcatagaagtgccgtatcgttctgcgttgggccagaattggtattttgcagcgtcaaatttctcgacacagccttctgtaaaaatgagttttttgtccggatatgcttcatgtactcttgcgacattgtcaaacatcggctgagcacctgtccaggtttcgtaccagtgaaaccccattccccaaacatatttggaagcttccgggtcggagaaaataacattggctctctgtaccattaaatcacgattgtgatcccaggcaataattttcaccttccccaaaccttctttttttaaggttggtccaaggtaattcttcaggaaatctctttcctgttcggcggtgtacaaacaggattcccaggtttgggtggccatgggttcgttctgaacggatgttgcccaaattggaattccttctttttcgtatgcttttataaattttgcatagaagtttgcccacggttgataaaattccggaagtaatgttccccctttgagcacattcttattgcttttcataaaagcattgggtgaccacggagtagcataagtaatcatttttccgccagccgtttttatagccgctttaatcatgggtaaacggtatttgcggtcatgatcaatcgaaaatgtttttaaatctttgtcgccttcttcgatataagaataacttccgctgctaaaatcagaactttgaatagttgttcttagcaatgaatatccgattcctttttggatatcgtagtaggcatttaaaaattctgtctgtttttcttttgataattgggcaaaaatttcggcacttgcatcggtaatggcaccgccaatgcccagaaaactctggaaacgtttggagggttcaacaaaaacggacaactctgtttctataggctgtctggatgccgtaaaatttaaatgatctgttggtgttaatcttaattgtgtattcgctgctgtggtataaaccgttatttttttattggtagtggtaaatttttgttgctgtttttggtttttctgttgtggaaaaacagataaagaaaaacataaacaagtaataatatagccaatctttctcattgagtatgttttaataattgagactttgatcaaatttcttagtcaaatgatttccggtttgatttaaaaatagcccatactcataatgatcatgggctatttacaaccaaccttaaacttaacttacttcattattgtggatatccctgattttgaaccattttagtattattgaattcactatatggaattgggaatgcttcatttttattggcctgaaatcctttgaaagcaagtttggcagcagcctgacctgttctcaccaaatcaaaccaacgatgaccttcacctgcaagttctaatcttctttcggctaaaatagccggaatagaaaccggtactgatgttaatccggctcttaatctaacagcatctagtagtgcctgagctcttgctcctgttcctcctaaagcttcagcctctaataaataagtatctgccaaacgaataacgtaggtattgattccaaaatttaagaaagggttacttgctttgatatcggcattaaccggtgcatatttaataaaatgatatccagtctcctgataactgtctttgtacgtaatcaaagtgttcggatctttatccggatctcctgtagctcttgcggtctttgcatcaaaaatagtagacgcaaaacgtggatcgcttttcatcgtatttgccagatcagcagtaacaacacaaaaaccccatccattaatataatccggcaaaagtgctgcttttccatattttgttctggaataatctctgattcccatcaactgagcggcaacatttccttcatcgtcacctctttcaaaattcccccaatctgcattggatttatcggtgtaggtaatttcaaagatagattctgaattgaattttttggtatgatcccataaagaagcgaaagtatccatcaacttatagccaaaactacttgttcctccgggagttccgtttacttttgccaattcaaccgccgcctgtggctttttgttatcgtataaatatacctttcctaaaagtgctgttgcagctcctttagagaatcttcccaactccggtgcaggtaagctcattggcaaatcaggaattgcttcgtttaaatctttttcgatttgtgcataaacctcgtcaggtttagcctgcataactaaagggatttcgtttttcgttagtggtttcaggatcaaaggaatattcttaaacattctcaccagatcaaaatagtaataagcacgtaatgcttttacttctgcggcaaatcttgctttcttagcggcatccataggaacatccggaagttttaccagcatgacgttacatcttgctacgcctttgtaataatctgcccaaattgccggtggaatattcgccggacttacagaataattcgatgccacctgaagtcctggctggtcgtctgaaccacccccacctgcatagaagtcatcggatgcagagtttaagaataataaaggcgcattttccattgctcctgcaaactttcctaatttatcgtaagctgctaccagacctgaataagcctcggtttcgtttctgtaaaaattatcttccagcactactccatctccctttacctccaatttttcatcggtatcgcacgatccaagtgtcagtaacaccccaaaagcgaataatgattgtttaaaacttataagtttcataatatcttttttttaaatttaaaattgcaaattaactcctaacatatacgattttgcctgagggtaatatcctctgtcaacaccctgtacgttgttcattccggctgtagtaggacctccaatctcaggatcataacccgtatatttagtaatcgtccataaattttctcctgttacatacaatcttactttttgcaatgagatgctttctatccattcttttggaaatgaatatccaagttggattgttttgaatcggaagaaatctcctttttgcaaattgaaatctgatggattcgtaaagtttttgttggaatcatccgtagtgactctcggataactgtttgttgatcccggtcctgtccagcgtcccataacttctgtttgataatttgcggtagaaatatcaagtcttctcaatccctgatagatcatatttcctccagcaccctgaccgaaaactaacatatcgaatcctttgtatgctaaattcatagtaaatccatacgtgaatttaggcaatgaagttcctaagaaagttctgtcgttagctccaattacaccgtccccatccaaatcctgccaacggaaatcgcccggtttagcattgggctgaattacttttcctgtcgcatttttataagaatcgatatcggtctgagtctggaaaataccatttgttttgaatccgtagaaggagttatacgcatgacctacttctgttctgttgatttcgtaagaactggactgtaccgtttcgtctccaactaagaaattaactcctttgtctatataagtaatttcatttttgatataagagaagttcccattaacagacaggttcaattctccaattttcttacggtagcctaattcaatatctacaccgcggttttccatatctgctaagttagcataggtattgcctgtggctccaacataacccggaattggcactttcattaagatgccttctgtttttttgctgaaaaggtccacacttaaattgaagtcacgtaataacgtagtttcaaaaccaatgttaagttgtttggtttcttcccatttcaagtcagggtttggaattgcatttggactttgtccgttaacaattaccccaccgatagtatagtttctttgaattccaactgtagaaatgtataagaaatcaggagaggaatcattacctgtaaccccataacctcctcttatttttaaagtattcacgattttattttctccccaaaaactttctttggaaggaacccagcctaaagatactgacgggaaagttccgtatttatggtttggtccaaagcgtgtcgaaccatcacgacgaagaatcccggtaaaaatatatttttctttgtaatcgtagtttaatctggaaaacaaggactccactctgtgttctaaagcttgtgcattgtaagcgttcgctattttatcagagattggaatgtcaacattaaaagaagcttcggcatgtgtcgtagccggtacacctctgtaggtgatatcattaccggaagtaatattatcaacataagtaccttttccaattaaaataccgaaatgatgatttccaattttcttatcgtagtttaaagtgttctcccagttccagctgaaagattttttgtacgatcggaacaattcatttacatcttttttggtagctccgtttaagtaataaaccggtgtaaagttatctgaaccgtaataggctaattttccccctgcagttgatttgaattttaatccgggtaaaatttctgcttcagcgaaaatgtttccaacaaaattatctgcaaaatcattatttcctaatcttgtttgcgtatacgctaatggatttgaagtttcctgcgttacaattgtagagataccgtagtaatttccgtttgcatctctaagtgcatttttgttctcgtacggagtacctgcaccggttgccgcacccggagcaacaagcaccggtgttaacggatctaagtttatggctgacgacaaaggccctccaaactcatcattggtatttcctacaccaattgttttttcatgagaatatcctaaagtctgaccaattttaatatacttccctaatttatggttagagttcaaacggatgttttttctgttgtaattagaaatatcagagtttacaataccttcctgatctgttaatccaaaagacatgtaaaaagttgacgtatcgttaccaccgctaaaacttagctcatgagaagaacgttgtgcatgattattaaaaattacattctgccagtctgttccgtttccaacatttgcgggaacggtatatctattcggagttccgccatttacgttggcttcattcataatagttacgtactgatttgcatctagtaaatctaattttttagctgcctgagatgttcctgcaaaaccggtataacttaccgagattttacctgccttacctttttttgtagttacaagaataactccggccgctgcacgagaaccataaatagctcctgaagcgccatctttaagcacctcgatagactcgatatcagactggtttaggtaaccaatacctccattgtcaacaattacaccatctacaacccataaaggatcattattgtttaatgtagtaaaacctcgaatacgtatcgtcgaagctgatcccggctgtcctgcatttgctgctatagaaaccccggacactctaccttgtaaagcttgttctacccttgttatagggagactctctaagtcttttgccttaacactggaaatagaacctgtaacgacacttttcttttgtgtaccatatcctactactacaacttcatttaaggcctgagattccgcttttaacttaacatcaattttagttcttccgtttacagcttcctgtactgtattataacctacaaaactaaatgttaaaataccgtttgcaggaacattgatctgaaattttccatcgaaatcagatgctgtcgccttatttgtgccttttattaaaatagacgcacccggaactggcattccattttcatcatttatgattccgcttactgtaacatcctgcgccattgtgacaactgaaaacaacagaaacgaaaaacaaaaaataagtaattttgttaatttcatttttctaaaaattttggttaattaattagtaattcgatgcaataataaatttaaaatttcagtatctgtaattaaatttcattacaaaaacacatcaacatataaattaacaccttacaaaaacacatcaaattataaataatttattgattttcaatattttaaaaataattttatactgttatagaatgaactgctagcagcacaacttccgttagaagcaaccgtgtatcttatcgttaccgctgtatctgctgtaacatcagctggcgtgtaaaccgatcctgtaatacttccgcctcctgaaataatgctccaggtacctcccgcaggtgtagcagttaaggttttggtagccgtttcgcaaatagcggtcgttggagtggtattattggcagtgcctgcaaacgcattcaccgtaactacatgagtggtggttacaggaccattacagcctgctgcacttgcagtgattgtagttgtgcccgaccatgttgctgcataagtaactgttccggttaccgcatctattgtatttcctcctgcaagacttcctgcatcgaggctatatgtgattcctgttgcattagtagctgtagtcgttcttgttactgttccggctccctgacaacgactagatgttgtgggtgagaatggcgctatagaaaccgccggatttaaagtaacctgaattacattagaaacaacacctgttgtacaactattgtaggaccaaactctataaaaataagttccgggagctaatcctgtaacgctgtatgaagtagcagtattccccaaatccctgccatctaaattagtgctgacatgagaactaaaattactattgttagagactgacaatccatatgaagtcgcccccgcagcagcattccaattagcggtaaagctgttacaagttatcacagttgcagcagtcgctaccggagctgccggagcaactggctgtgcattaattacgacattcgatgaagctgctgaagaacatccatctgcattggtcactctaaaagtataggttcccgaagccggaagacctgtgatagttgtacttgctcctgttcctgtagtagttacatttccaggcgatcttgtaatcgtccaatttccagtcggtaatccgcttaagacaacacttccggttgaaaccgtacacgttggttgtgttatcgttccaatagttggtgctgccggcaacggagctaccgttaatgttgcattaggcgatgcgctaaaacaaacattatccggatgtttaacaattacagtatatatttttccatttaatccggatacatttgaaattcctaaattagctgtagtggttccactatataccccggtattcgttaagttaactccattttcctgccattgatatgttatagaacccgaaacatccgtagctggcggaactgtataatttggtactccatttgtataagatatagcattagcggcatttgctaccaccgagaaagttgctgatttacaaatcgctaccgtttgattagccggaggagttgttacagtaacttttgttgcttttgtaacatttgtgtaactaccggtataggatgctgcagttactttcccgttaagatcaactgccggctttccgacgccataggcacctccatcacctccgtctgcagttgtattattatagtattcgtttgcatcagtacagccatcattatcactatctgtttctaaagaattaggaataccatctccgtctgtatctgcacaagactcattaatcgttatttttatatcatccagaaaatttcctacagatgaagcaccactcgacccatttgatgaaatagatttaaaagcaattacaagtaccgtttttcccggtgcgatggtatacgtccctgagtaggatccccacgacgaattaccatctgacattctaacttgttcggttgctgttgctacagtttctcccatgttaacacttgcaatgtcagtgccttcccttcctctgtgctttaaagaccaggtaacagtacctccggctccatttaaacaaaactcttgataaagagtagaaacctgattggcattaagttctacaaattgatttccttcagcagcaggaacccccataaatccagatttccaaatttctatctggccatcagtagcagtagtattccaaccgggaacagccgtttggtttaacaaagtataggtactacccgcaattaccggatcttcaaatcctccatttgcaaacttaacagagcagcctaaacattcaacggtatcgagaataccatcattatcatcatctaaatctttccaatccggtactccatcagcatctgtatcaactgtaaaatttggatctataacgcatgttgtagtgactaccgaagcatcgatagaactcaacgttacatttccactaaaattactccctcttttgacctctatgtatctccaattaataggagatgaaaaagtataatctaatgataaatcggttccaacagaggtccatgcaccagtagtacctgccctaacacgtaaatcaagtttccctccatcgcctccattaacttttacagaagtaccgctattaatagtagtgcccatatcaagaacaagcacatcactactactatcaaaagtggccacagtattatcgtcacttcctgttgcattcgttccattagcgacacctgtatttgacgttacgcttgcagcatatacatgagtggtagtactggaaggcatttgccctgggagacattgcccagaaattgtatttacagataataataaaaaagaaaatgttataaaaacattctttataaaagtaaagttacacataaacaactgggtttttagaaatagaaataccagatactgaaaaaacaatagtggttttcagcacattggataaatacgagaaaaaaacaggaatggttttttgaagtcttaaaaagtgctttttaaaagctttatcaaaaaagggtagcgtttggaccataggtatataggttcaagacacaaaatgtcttttggttaaattagtagtttttggaggcgcgaaaatatgcaaacaactggttatcagctatatttttcgacaaactacccgaattaacgatgaatgacattttttataaaccctaatactcttttgactacaaaaaaaatgactatttgataacgaagcggtaaaaatgaggagctatattatgtatatattacacttttaaagaatataatgacaaaattgcaataaaaaaaagcgcaacaatgttgcgctttttaaatataaaatactgttttccagtattttatattatttagaaaaatacaaataccccattaaacttaccggttcgtttaaatacgttttatacgtaatcacgtaaaaataagtaccaaccggtaatcctttttgtttattcacagttgcccttccttctgaaattcctctaaaggcaactgacgtattattataaccatgagcatcataaaccagaactccccaacggtcataaatttctaccgttacatcaggataacattcgaccccatcaattttaaaaacttcattgatcccatcattattaggtgaaaatgcattgtgaactgtaattttacaagcatctaatggcagtacggtaggattgtctcctaaaatagaatttccatcagacaagtcttttgcaatttgcccgtccgggctgacggcactcacctcagcctgattttctacagaccctgcctcgagatcagcagctgttaaaacataggttccaacaaagttattagaatttgtctctccctgttttagaatcaccggatcaccggtaatagttactccaggtttaggatctttaacgacaacatttacgagtataatatttccggtattggttatgctaaagcgatacgtaactgtttcccctacctcagcatatccatttttgttttcatcattaaaagtagccgttttgatcagtgcaatagaaggtttaaggcttaaattaacaaccgttggatcatcatcaccaattaaagtggggtcatcgctatcggagatatcggtaaccggattcccctgagggtcatctccaattgcaagtgccgaattgattactactcctttggcaacgtctgcaatatttacggtatacgatgctgtggctgctcctgttgctcccggtgcgagtacattaggagaaacagcaatggttgtcgctgttaacatcggatctgttacaaccaaattggtgagtactacatttccggtattcttaaccgtaaaactataattgatgattgaacctactccgccatttccggttaattttccaccttttattaaagttagttctttatgttgaggcaccggagtaattgtagggtcattaggtccaattaaggtaagatcattactgtcggacaaatcctgaatggctgatccgctagtcggctgtgctgtaaccaaagcttgattttcgacatagcccagattaatatctgcctgagtcaacacataagtgcctttataacttgttgtattggattgccccactcccaatactgcgattggtgtacctgtaatatttgcctttggatcggttaccaccacattgtttaaatctaaagttcccgtattggtaataacgaaggaataacgaatttgctctcccggctgtgcatacccatcaccattggagtcaacgaaaacaccttgtttaagcaattgaatggaaggttgtgctaccgttattttgataaccgcttcatcgcaatttgacggatttaatttgtcacaaattttatatacaatagagtatattcccgcagccgtacccgcaggaacatctacagcaccggtaagaatatttaaaacaggaactgcagctccgtttatggagtttgccgcggtaataagcgtactattaatattggtctgcagaattgttgttccgtttaaagtatcgttggcgtacgcatttaaaacattacttgctccggttaatccattaatattgtcagcggcatcatcattcgcaacaattgtcggaaccgctactacaacagtaataatggcatcgtcgcaatttgccgggtttaatttgtcgcagattctatatctaatctgataagttcccaccggtgtacctgccggaatgctaacaaaaccagtcgccagatctaagacaggaaccagtccaccattgatagaagttgccccactgattattgttgggttaattaaactcacatctgttagaagaactccgttgtacgtatcattgtttgtaaaagcattcagtacattatttattcctgataagccgtttgcgtttgtgatggtatcatcttcggcaactatcggaggtgcgtttacaattatgataatcgttgcctgatcacaattcgtcggatttagtttttcgcaaatttgatattgaatgaaataagtccctgcagaggttcctggtggtacatttacatttcctgtagcggtattcaataccggaacaattccatttgttgatgttgacggtggcgtagtactcaaaacactgatattaaccagagtggcttgtgctgttactccattaagagcatcattagttagcacatttactacattgtttgcaccaacatagccgttaatattacttgcaaaatcattattagcatcaataattggggcaataacgtttacggttatatctgcctcactgcaattggacggatttagtttttcgcaaatacgatagtgaataacgtaaattcctgctgaagttcctgccggtacatcgacatttcctgtcgctgtattcaataccggaaccgggttgccggaaacatatcctgttggagttattctacttacagatgtaatatcaatgttaaccaattgaatatccgaaccgttcagtctgtcatttgtaatagcgtttaggatgttggttgcacctgtatacccattaatcgtacctgcgttatctgcattggcgacgatcgttggcgctataacatcaatagttatagttgccgtatcaaaattggcaggatttaagttttcgttcaagcgatattgaatggtgtaagttcccgctgcggttcctgccggtacatttacatttccgtttgaaggatttagaactggtaccgctccgccattaattggtgttgccggaactacattactgatagttacctgagaaggaataacggccgctccgtttagagtatcgttcgttagtgcatttagtacattaactgctcctgtaaaaccattgatattggccacggcatcattcacggcatctatttgagctcctgttacattaatgaaaactgtagcattgtcacaattcagcggatttattttctcgcaaatgtggtatttaatttcataatcgccagccggagttcctgccggaatacgaacaaatcctgttagcggttctaataccggaaccgggcctccgtttattgctgttgcgggaacgtcaactgtaatgtttactttcgaaatattagctgcagttccgttaagagtatcatttagtaaaacatcaattgcattgttggtcgttacatatccgttgacattagcaatggtatcatcatttgcgacaattaacggagccgaaacctcaacggttataatagcagcatcgttatttgacaagtttagtttttcattcagctgataacctataaagtaaattcccgctgcagtgcccggtggtacgcttacgtttcctgttgttgcgtttaataccggaacgagacctccattaataggtgttgccggaataatattagtaatcgttacttccgaaggaattactgccaaaccatttaaggtatcgttgtttaaagcatttaaagcattcggatcaccaacaaacccattaattggggcaaaattagcatcatctacggcatcaattggcgcaggaacaactataatggtaacgactgcctgatcacaattcgtcggatttagattctcacatattttatacacaaacttatattctcctgccggtgtgcccgggggaacgtctactaaaccggtaacgctgtcaagtgtcggaaccggaccgccatttatagccgctggagttgatataacggttgtcgtaatatccggaaggtccagcatgcctccattcagtaaatcgttatcataaatattgataatatcgtctgctccatcataaccattcacatttaaaacggtatcatcaatggcttcaataattggtgcaactacattaatgattacaattgcatcatcacaattgccgggattaaggtcttcacagatctgatatttaatttgatattgccctgccggagttcccggtggaacagtcacaaaacctaacgaaacatccaattccggaaccggagctcccggaactttaggctgggcaggtgttaaaatggatggagtcaataaattggccaaattgatattaatgacttgcccgtcaaaagtatcagcgcctgctgcattggtataaacattaatcacatctaccccgccttcgtaaccgtttacattgtttacctgatcgtcatttacaattagcggagcagcttttacgacaactgcaatactagcgtctgcacaattggttgggtttaatttttcgcaaatagtataagtgataaaataagtattggccggagttcctgcaggaatgctaatacttcctgtcgcagaactaaagacaggcacattagcaccaggatacaaaggtgtagcagctatattttgtgttattgttatttcatcaaaatttgctgctgtaattggaactccgtttaaactatcattggttaaagcgtttgcggcgttcatttgccctaaataaccatttatattttctactttatcatcattcgctacaattaatgcatttccaacaggaaccaaaataaatgcagtatcacaatttgtagggactccaatttcgcaaatcttatattcaatttcatatagcccttttacagttcccggcggaacatttacatttccggtggtaatatccagatacggaactgttgtaaccaaagggtcaatcggcaaggccggatttactacagaaagtgtcacattagataatgttgcctgtgcactggccaatctgtcattcgtcagggcattgattacattgttagctcccgtgtatccatttacgagatacctaacaatatcgattttggcatcaattccggcagtggttacactaattacctctgttgctgtagaacaatttttaaaattggaaggatctgacggatttcccgggtttacaatttcacatatcgtgtaagttaaggtgtaatctcccgctggtgttcccggtgccacagaaatggttctggatagcggattaaaatcataggttaaataacttgaaatagagtttatggtcacattaaccgatgaaggattcaaaatcactccgtttatggtatcgctgtctaatatagaatgtggtgcggtacttccacctgtgtctccggagattgaggcaaaattttctggaactgcacaaattctgttaaaaatagtaaagatagtccctgacgaaatacaagtattcagccctacccgtctgacataaatcgttacgtttccggaaggtaaacctgtaaaaacgttgctggcctgaaaagttgttccatcactgctatattcataaccggtacccagatccggattcgtgatattaacagtccctgtagcaatggtacaggaaggctgttctgttactgcaccaactggggcggtcggaagattaaaaacttgtaaggttacctgattggaaaaggtacgacaaccggattcagcctgagagatcataactctaaaataacggtttcctgcggtcgcataagccggtgttgtataagaagctgttgtaccgccaactccagctgttacatctgtataaggtcctgccaaagcagcagcactttgccattgatacaatattgggcttccggaaatatttcctgctgccacaacggtaaaagtatgagtctcattaatacaggcttccccatcttttggctgtgtgctgattattggaatctcaaaaacatctactttcgccggattagaatttatagttccgcatccaacacctgaatctgttacatttaatctgtaatacgcatcggcatttacaaaaccggtggtataagttgttgtattggctcctgaaccatccgttacgtttgcccagcctgttgttccatccaacgatttttgccactgataggtaaagtttccggaaccattttgggcagttgatgtcatcgtaaacacacctccttcacaaatatttccgcccacgggctgtatgcctatcgttggatccggaataacacttgctactacaacattggtaataagagtacagtttggatttgacgaagtgattacacaacgataataagttgtaactgaaagtggtcccgtcaaataattcggattttgtgctctgatttctccggtaatatcagcccaaccattaaccccgtcagaagaacgctgccattgataggtaaacgaagccgacccattgttagcagaagccgctgttgacatcaacactgttcctcccacacaaacggtattcggattaacaggctgagtcgtaatacttggaataattacggaagcaatactcgataaaattggtatacatccctgagtaggatcagaaatggccacctgataaaaagtagtcaccgttaagtttggagtcgtataagatgccgaatttgcacccgaaatatcagtaaacggacccgctaaagcagcagagcttttccattggtacgcataatttccggaacctcctgccactactacatttaaggtggcgtttgaaccactgcagatgtttgttctaaacaccggctgtgtcactatggtaatggccgacaaaaccgttacggtcgctacgttcgaagtaatggtattacatccgtttccactggccgaaacctcaactttataataagtagtttgtgttaaagcaggagttgcataagttgctgccgttgccccgcttatggctgtaaaagtcgcattatttgtactgctataccattgatacgttaaggtcggagttccattcgctccggttaccgataaagtatgatttcctcccgaacaaattgtcgctcctgttggctgaacggtaatagatggatccggaaccactgttgctgtaacggtattggaggttaaagtacaattggtagtcgatgaggtcactaaacatctgaattgtgtagttccatttaatatatctgaagtaaaattagccgtagttgccgttgcattggtttcattcacaaaacctgaacccgaattactttgccattgataactaagtgatcccgtacctccatttaaagaagccgaaatactaatatttacaattcctcccacacatatagccactggagttactggctgggtagcaatagttgccacaaatactgctacggcgtctgaataaacttcgcagccatttgcagcttgtctcactcttactctgtaataaaaagtagaagttaacgctccggtggtgtaagcggctgttgtggcaccacttcctccggttgtattggcccagcctgttgtaccgtttgccgatctttcccattgataaatcaaagttcctcccaaaggatcgcccgaagctgcgactgtcatggtatgtgtcgcaccggaacagattgtatttccaataggctgctggttcacaaccggatcaggaattacatccactaatacgctattggaagataccagaccacaaccgtttccggtagccgaaacatccacacgataataagtatcctgtgttaatgccggagtggtataggtactggaagtcgcaccggatatttgcgcaaaacttatattatctgaactgctgtaccattgataatttaaagacggagttccgcctgttcctgtaaccgataaggtaaatgctccgcctgagcagacaattccgcctgttggcggaactgatatggcaggatcagcgactacagttgctgtaaccgtatttgaagtcaatacacaattggttgttgatgaggtcacgagacatctgaactgggtggtagtatttaaaacatcagacgtaaaattagcggttgttgccgtcccattggtttcatttacaaaacccgcacctgaattactttgccattgataactaagcgttcccgcacctccatctagtgtggcagcaatagtaatgcttacaattccacctacgcaaatagccgccggagttgcaggttgcgttgtaattcgtgcaacattgaccaatgccgcattggagaaggtttcacagccgcttcccgattgtgtaatttgtgccctaaaatacaaattcgatgttaaggccgctgtagtataagttgcggtattggctccacttcctcctgaaacattggtccagcccgaagttccattcaccgaactttgccattgatacccaatcgttcctgcagcggtattggtagttgtcgcagcgaccgtcatcgtatgtgtatctcccgaacaaattgtacttcctgttggctgaattgtgacaacggggtccgcaataatcgtaagttttgccacattactcgtaacctgtgtacaagtactcgaaaccattactctataataatctccggttgttaaagcattattagtggaaaaagaagcattcgtttgccctgaaatattggcccagcccgttacgccattggcagaagtttgccattgataggtataaggagctatacttccggttgggctagccgtaaaagttgtggtacctccttcgcaaatggtggtgtcacttgttaatgccggaagaactaagtcagaaggccgtactatattgacttcatctgtataagaattacaagaaccattgctgatcgtccattttaatcgcgttgtccctactgatatattcgttaccgtagtattaaaagcattggcattggtgattactgccgtgcctccgggattcgtgacaaaagtccaaataccagttcctgttaccggattgtttccatttaaggttgcggttcccgtattacaaatcgtctgatcggctcctgcatttgctaaaggcggcaatgcatttacagttactgaaacagtactggaacttgatgcacacactccgcttgtaatcgtccatctaaaaacataattacctgcctgtgttcccagaaccgttgttgttggcgaagtggcatctgtaaaactcaccgttaccggccctgaaacttgtgtccataaacccgttccgattattggtgtatttgctgccagagtaagtgtttgaaattcacagatactaattggagttcccgcatttgaagtggatggcagagggttaaccgttaaagtcagctcatcaaaaaattgacagctcagatttgtggctgtccatctcaaaacataagttcccgaagcacttggtgtaaatgtagaagtcggactcgaagcagcagaaaaaactcctgccggtccactggtttttgaccattgccccgttccaactgcaatggcattggcggctaaaattgcactatcagattcacaaatcgtctgatcaggtccggcattaggaattgttaaatctgcagtcaccgtaatttgaaccgagtctgttgtagacggacaaagcgctccattgctaacggtccagctaaaaacatatacccctcctgtttgtgtcagattgctaaccgttgtagtaggcataatatcagaactaaataccgctgtagttggtccggaaacctgagcccattttcccactcctgccagtggtggaattgccgttagatctgtcacagatccacaaatacttttatccccacccgcaatggcctgtgaaggcggttctgaattctcaatcctaatttgatccgactcactacaggttcctgaactaacggtccagttaaacacataaaagccataacccggatttataaacatcgtattaggatcggtatcgtttacaaaagatcccgttcccgggccaaataatagggtccattttcctgttgttccgggatcaggtgtcgaagctgccagctgaaatcctcctgcacctacatcacaaaattcctgatcaggccccgcatttggaggtgttgtaatctgaccgtttaccgttacctgaatatcatctgacgtttcaggacaaaggccttgtgccgcaatagtatatcgaaatacataaacacccggtattaaattagttactgccgcgctattgttactggttgttgtaatggttggagctcctgctcctccggaaacataagtccaggttcctgtactgttgggattacccgttaaatataaaggtccctctaagcaggtggcataatcagaccccgcagctgcaacttccgttacttttacagtcatctgatcttggtttgtcgaacaatttattcctgtagaggttgtccattctaaaatatattctcccgttataagtccggataaagttgaattagccgctctagcatctgaaaacacaggcgaattgggtccgctgactaacgaccagattccattgccaatcaccggaggagttgccccgagcgtaaccgaattttgattacaaaccgtttgatcaggtcctgcgattgccggtgaaggaccttcatcaacattaagctgtaccgtagctgatgtactcgcacagaatcctcttgagatggtccatttgaacacccaagaacctgaagttagtcccgtgattgtagtagtgggactagtcggatttgtaataacaggtccgtctcctccactaaccaattcccataggccgctttctccggaagctggtgcatttgccgttactgttgtattattcgcacatagtctttgaccaggacctgcctgagctacagtaatatctggtgctatagttatacctacactatcttcaccatcagtacagcccacattactaacggtccatttgaaagtataatctccgtcacttaatcctgttaccgtagtattatattgcgttggatttgtaatggttactgatgttcctgcggtctgagtccaaataccggttccgggagcaggatcatttccctttaaggtaatcgtgctggtaccggttggaaaacattgagcagctcctgcatcggcatccgctccttctgttccattggtaacaacatcaactgtatctgccgacgtaccgcagccgtttgcaatagtccaggtaaaagtatacgttgtattggcagccaatccgcttactttggtatttggatcacccggatcgctaataattacaccggcactgggagaaactgtccaggtaccattttcgctgttctgtatagcatttccctgtagttgaacttttgccccgaaacaaactgcctgatcaggtcccgcattagcagctgtaggggcaacactggataccaaaacctcagaagtgctttgagatacctcacaagcttctccaccggaaatggtccatctaaatttatatgccccgttaattaagggagatactgttgtagtggggctattgacatcagaaaaagtcacactgctagggcccgaaatctgtgaccattttcctttcccccgaacgaccagatttcctgccaatgttccggaagttgaattacaaggtactatctgcatcgttccagcactcgaagtggtaggagttgcagataccaccaatgtcacattatcattaacagtttcacactgactcccctgatttggcgctttaattaaccgaacaacataagttcctgaaaaagtcaattgactaatcgtaagactgtttcctgaaaaattcaccggaggtgtcgggaacgaaggatagggcggattcagaatggggttgatacttgggcctgatacgatctgccagctcatttgcccattacctgcaaaagttaccggaattgttgcctcagactcattacagcccagaacctgatccggacctcctgaaatggatattatatcttctaagacgacgacatagttagccgtcgtcacgcaatttgttacactattagtcagggtgtacaaaaaagtataggttcctaatgtggtcattcctgacactgctgtggaaggggaagtcggattttgaattacagctgtcggacctccggtttgtgtccactgcacactttcatttacgtatcggggtattgttccctgaaggattgttgaggttcggccatcacaaaaataagcggttgaaccactcacattggtaacatctgctgttggaggcggaaccactactgttacttcatccattccattggcacaggttccggcaacagtccatctaaaaacataagtaccttcaagcagacctgttacggttgtattgttttgattggcattcgtaaaagttggaataccaggtcctgaaacaactgtccaggtaccttgctgctgtcctggtgtgcttccgccaaaactcccattaagagtaacggtctgagttgcagaataacagtttgaaagcgtgatatcagctcctgcggtaacaggcattcttccgcccaagcttgaaataactacgtcatccgttgaagtacaggatgcatttgttatcgtccatcttaaagtggtcgaaccggaactatttccggaaaccgaaatggtactagtgggagaatttggattgttgattgtaactccggcattattatttcctacaatactccaggttcctgtttctgttcctccaactgtatttccggtaagtggatatgtcccctgacaataggtttgatctggtcctgcatttgcacgtgtaagtggcgaaaccgtcactacaacatcatcaaatatggttgaatcgtcgccacatttagccgttaatctaaaagtataactatttcctggaatcgctcccttaattaaggtttgcaatgcgttcggatcatcgatttgtaccgctggccctcctatctgactccatttcggagcatccataaaattagtccccggtgccgtattggctgtccccagtaaataaaactgatccggcggtaaagctgttgctccacccggacaaattgttctgtctgcatttgcatttacagtacaattctgtgaaaaagtataaacgggaagtacaaataaaaaaaagaaaagcgttttatttagtcctttatgtaatttatcagagtaatttaatttcataaatttaaatttttgaattaaaaacaaagaaataacagtaaaaacattggggcggcttaacacaaatttaataaaaaaaagcttatctccttaataaacgcattgattattagatagttacagaatcgaaacaatttaaagtcgtactttactgattatcaataagttacaagtatagaggggttttatttgtataaaaaaacgaaataagaactcctaaaatcattaaaaaaacaaaaaaacaagacaaactacatcctgtttttagttttattcaagaaagagaatattgcgttttaagccatcaaatttggttcttttgataggagaatttttaaaaactaaccgaaaagtctcttcggtaatttcgatccaatcctttttagaaaaagaaagcagttccggattgggattgaataaaggttcggaatgcggctttgagaaccgattccacggacaaacatcctgacaggtatcacagccaaacatccattcatcaaactttcccttcatttcatgaggtatgttttctttgagttcgatcgtgtaatacgagatacatttactgccgtcgactacatgaggagccactattgcctgtgtgggacaggcatcaatacaggcggtacacgacccgcaatgatctgttgtagcgtggtcgtactctaaatctaaatccagaataagttcggctatgaaataaaaagatcctactttttgagtcagcaggttaccgcttttaccaatccagcccagtccgctttttgctgcccaggcccgatctaaaacgggtgccgaatctacaaaagcacggcctgatacttctcctatattctcctgaatcgagtgtaaaaattcttttaatttttctttaatcacaaaatgataatcctgaccgtaggcatatttcgaaattttaaaactttcgtcggtctgagtttctgttgggtagtaatttagtaaaagcgacactacactcttagcatcatctactaataaagtaggatccagacgtttgtcaaaatagttctccatataccccatctgcccatgatggttgttgtttaaccatttttcaagacgcggcgcctcctcttccagaaatcctgctttggatattccacaagaaagaaaaccaagccttttggcttcagcttttatgaattttgaataggtctctttagaattgattgtcatcttttagagaataaaacttctattccaacaggttttaaagtaattaacggattgaattgaaccgtatcagtctccgatttaattacatattttttcacaatatgagccacagtaaggcacatttcatagatcgcaaatcccgctccgatacacattcttggtccggctccgaaaggataaaaatattgcatcgagtgtttcttttgttccccaagaaaacgctcaggaataaactcttcgggattttcccagtatttaggatttcgatgcaactcataaaaagaaactccaattagtgttcctttttttaaatgatacggtcctatagtatcgtcttcaacattttgccggtctgtaatccaggctggcggatacaggcgcatcgcttcattgataacggcattcaaataggtcatcttctgcaattgttctactacattctctgtttgtgcttcgatttccagaatttcatccaatactttctgctgtatctccggatttcttcccaaaagatatagtgtaaaagttaaagcgttggcactggtttcatgtccggcaataaaaagaatcttaatttcatcgatcagttgtttgaccgacattccttcaccggtatcttcgtaacgggtttctaaaagcagctgaagcaaatcgtttacgggctctcccgaagtggttcgctcgtcgataatttcctgaatgattcggttgttttcttcggccagttccaaatgttttgccacctgaccactcaccgaaaaccaccatgctttatggggaagccgaatttctttgatcaaaaaatgctgaacttcttcgatgatgtatttgatacgatttaatttctcttccgaaatcgaaaggtgaaacagtgatttcgccactacattaaatgcgagctcactcataacaggaaagaggtcaatgcacttttcttcctccaattcctttaattctgaaacgattgtctcgttcatattctcaaccagctgattcatcttctgtttatgaaacgcgggctgaatgagtcgtctttgtttcagccaaaaatcaccgtcaacggtcaaaagtccttttcctaagtattttgaaagataaacggactgaaatttagatttgtgatagttcttttgatttttctgtagaatatgctgggcaatctcattatcgcgcgataaaatcaagtgtttcgaacgtcctatctgaagcgaaaaagaatccccaaactgatcaaaatatcttttatgataaggaatagggtttctacgcactccttcggcatctaaaaagaaccttacgatcgaaagcttattcgggtacttgtattttttattttcagacatgcttaacaggattaaaacaatccgccctgaatgttggtatttatttttcctaagtgtttgtaggccttatccgtaacctcacgtccgcgtggtgtacgcataataaaaccttcctgaatcaaaaagggttcgtaaacttcttcaatggtttcactgctttctgatacagcagttgccaaagtcgaaagtcctacggggccacctttgaatttgttaataatggtcagtaaaattttattatccatttcatccaatccatgcgcgtctacatttagtgcttttaaggcataacgtgcaatttcgatatcgatggttccatttcctttaatctgtgcaaaatcgcgaactcttctcagcaatgcattggcaatacgaggtgttccacggcttctaccggctatttcgatagcggcatccaatgaaattggcattttaagtatagaagaacttctttctacaatggtggtcaaaagttcagtagtatagtattgcaaacgggaggagattccaaaacgagctctcatcggggctgtcaataatccggaacgcgttgtagctcctatcagcgtaaaaggattcagattgatttgtaccgttctggcatttggtccggattcaatcataatatcgattttgaaatcctccatagccgaatacaaatattcttcgacaataggactcaaacggtgaatctcatcaatgaataaaacgtctctttcgtcaagattggtcaataaacctgccaaatctcccggtttgtccaaaacaggccctgaagtaattttgatccccacttcaagctcattggccaaaatgttcgccaaagtagttttacccaatcccggaggtccgtgaaaaagagcgtgatcaagtgcttcaccacgctgattagcggcagcaacgaaaatctttaggttctctaaaacctgatcttgtcctgcaaaatcatcaaatgacagtggacgcaatcttttttcaagatctaattcttccggattgtacccttttgtagtgggatctaagttttcattcattttacaaagatagacaaagaaattagtttgtaaaacagttacatttcaaattcgaagtttcaggtttcagctttcaggtttcaagtttcaagtttcaggtttcaggtttcaggtttcaagtttcaggtttcaagtttcaagtttcaggtttcaggtttcaggtttcaggtttcaagtttcaggtttcaagtttcaggtttcaagtttcaagtttcaggtttcaagttttaggttttaggtttcaggtttcaagttctaaatcattcctttgccggactaatgacgaacacctcttcgttatccgccatttgaattccgatactctttttaggaaatgttttttaagaaatccaggagctttacttccctcttaatgattcttaccaacataactccaaaaaacagtaaaaaaccaaatccgctaacaaggatatagagataaaaccctttggacaaattttctttaaaaacgggtaaaagcaaggtaaagccggcaacataagtcatataaattatgggcgtaaaaatgtaatggattttttttctccattgataaaagtgttgagcctgcttgctgtattcgattaaaggaacgtctgtttttaaattctcgaattttcttgcgctcctccactccagagcgatgcggaccaccaacatggtaatcataattcccaatccgaaactgaatacagtttgtttataggctcccacccaaatgtaatagacgatcagtatgattgccgtcagactcagaattattctagtccaaagatgattgcgttttatttttttagtatgtgcttctgccttttcaatgacatcgttggcggctggttttatattggatactgcttgctgatcccaaatgttttgtaaatcttcaaatgttttcattttgtacacattgcgttaaactttttttaattcgatggattctaacccgaagtgtttcttcagtgattccgattacttctgatatttcgggatattcgataccatctaagatcatcagaatgatcattttattggtttcttcgagcttttgtatgcactgatacatttgctgaagctgttcttctttttcatccgaatacgtttccgaagcaaccttaggcagtatatctgttctgatttcttttcgcgtagatgattttcgtaaaaaaagaagacaggtattaacggtgatcctgtaaatccaggtactgatactcgattcattccgaaaggtatctaaatgctcccaaaccttgatgaaaacttcctgagctgcatcagaagctaatgcaatatctccacaaaaataacctttgcacaaacgaaacactttattgtaatgtttgttatatatctcgttaaattgttcttttttattcaccttaacgtatttctgattttactttttccatgaaccactccggttgatcgtacattacaaaatgtgccgaatttgctgcataataaattttcaccgatggcagattttcatactgcgctttataggtgttttgtacggtagcaagatcgggatttgtggccgctaaaattactaccggaattttaatttgggcaatttctttacgtaaatctaaattaagcatatcgatataaccgtatacataggttttcctgtcggccgcattcatccattcgttgattgttttttgcttttctttgttcagacacatataagaagtcgtctgggaattcatcgcattgaaagccttttggtccatagccagcatcattttgctttgtggattgtcataaggaataacttctcctttgtaattaggaatcattagtgctgcacttgccggtaaagcatcaacgatgattacttttttgaacaaattcgtttcttcggctgccagccacaaacttagagttcctcccaaactgtgacccattaatgtggctttctttagtttcttcgttttgacataagagacaacctggttttttattgtagacaaccaagggccttcaattggaggaacatttccaaacccggcaaaagtaaaaatatggcattcgtaatttttagaaagttcggctacggtttcgttccacacttctcctgtacagccaaaacccggaaataataaaacaggtgctccttttccttttacatcaaccttaaaagcggtttgcgaaaaaacagattttgaaataagaagcatcaatgcgatcagtaaaattgatttagttttcataatgttattttttaaagtttctcttttgatgcagtgctatgctatttgttacctcaaaaaatacttttttttaaaataaattataaacccttaatctgcggcacttcacgcgtgcttttgttccgcaaaaaactgaataatccagctactttaattatttaatctctttcagaatactctcggctattttattatagtcattgttgtagtgatgtgacccgggcaaagcaatagttttgattccggctgctgagaaacgattgcgggttgcaacgtcttcttcatctccgaaaaaacaaattggatcataggacttgattttttttatttcggaaatcacatcaaaagtgtccttcgaactttccatactcagcatgtctgcaatatgaatttcaaaatcagcttttacatccggagacaacaaatacaatccttttaatttttcttttaggggttccggaaaattacctgctacaaacggaattacagaagcaccaaacgaataaccggcaagtataaatgtttttcgattccattgctgtaaataatgttcaactgctttggctattgcattcgaagtctcggcaggagttttggcattccaaaaatatttctgggaatccaatcctattacggcaattcctttctctgccaatgcttcaccaacagattgatcaaaactagtccatcccccatcacctgaaattaaaaaagcgaccggcaaagattcctctttactttttgttggaattaagattaaaggcatttcaaaaggcaaaggtgcaaggtgctgttctttcagcaaaaggttttgttctgatttctgctgattataattcggggtattcaaaatctccctgaaggcagctgtaaattgaggcagccagtttttagtaacagaaaaaccatgtcccactttgggcagtgtgattagttttccctgcttcatgccttccatgtatttttgggtgtcggcataattacaaacctgatcggtgattccttgcaagacgataaaaggagccgataatttttcggttttttccagaaaataagcttttccttctttcaaaacatgtgaagtcagtccggaaccatcgcataaagtcctgtcggtttctatatcgggacaaaaccctaaagcaatggctccgccaaaagtattcgcgggagcctgagccagcataccatagatcagggttgctcccgaagaatatccggccaatattggctttagatattgcttcatctttatctttttttgcagcatcagactaagctcttcaaagtctccggcaggataataacatttggatttttcttttttgatttccttaaaataatactgaatatcaatccccgcaaccacagctccctggtcgacaatatttttagccatatcgacgacaccgctgttccatccgccatcacctgacacaaacaaaacaaccgctgttggtgttgttttaggtttgtatatcataatttttccaaatgctccaacccttaaagtatctgttgttacggcataaacattagtcccaaaaataaaaaccgacagaagaagtgttacgactttgttcatcttgattgttttttaacattacgaaatcttaaactataaacctgttgggaaaaattgatttaacacatagaaacatagtctttgcatccctaaaaaaggcgtttcactttatttaaatacacaaagtatttactatgtgagagaaatttgtttctttttgtattcctttccagtttaaaaatctatgtttctatgtgtttaactaaaaatttagtaattacgcccaacgagttaaactggaattttcctattatacattatgactgaaattgcaataaaataaacatacagattgagcagaaaaagcctttgccataatcctctgcatgaagcaattaaatcacctgcctcagaaggaaaacgaatcccaaagcacaacagcgtaatactgccaatgataaaaacaatccatgaaaaacagtaaaacggtgaattgtcttcttttgaaatcacgctgcacattactaaaggcagcaatactgcagcaataattccgataccccctgcaatatcatgcaaaagaaacgagaatgtccttttaccgtttatgctatccgctttaaacaaaccggagcctatcccttctcctaatccatacatcacaatcaacaaagaagcaagttttacatatctcccatctttctcaaaggcttttctgaaaaagactccaaaaaaaacaaatacgattccaattaaaatccaccaggcagaaattaatttagataccggactaatagtggctcccaacgaactaatggtgttctgcagctgactatacccctgataatactttcctaagacaaacagtactatacaatctgaaatacaggcaattatacacattactgctgctgctctaacccaattgaatggtactgttttcccggtcttcatcttctccattatggttttacgactttatttaaaactagcggagcctgcagcaaatcataatcatgcgtatacactaagtatttattgtaccaaaccggagaaaatttttccttaaaatcacgcaatcctttataatgtgaaaaatacttaattctttcataagcaaacttcattgacttttccggaaaagtgtccgggtcttcaattccactcatcgcagctaatcctaaattgactgacgtacagccctgagttttcaaataagcaaaaagttctaaaaggataaaatcgatgatgccattcggcgcatcattggttttccgaatcaaatcgtaggttccttctcctttagcataatccggaatcacatttaaaaaagccacaattttctcttctgcattttcaactgttatgatggtttgctgtttgagttcttcccaatcaaatttaccttgcgaaaaaacgatttcagttcttccggtacctgcaagccattcatcacttaccgctttaactttttgcagcaatccgtctttaaccggtgcggtatgaatggtagtcttaaaccccttttctttgactttgcttatcgcattacgcaatgattttttagcccctccttccatagtaaataccgataaatctacgacagcttcctgtcctataaacaaattctttttgtgtagtgaggcaaagagttctaaattttcttcgggtacacgataataaatacttcgcaagccattctcgtaacaatacgagtcaaactcgacaatacactgtttaaattcatcctccgatgctgcgacggggttttctaaaaccaccgcaaaactatcccccacacgataagctaaaaaagactttttacttgtcgctaaaaaaatatttttatcgtcatacgttttaaaataatccaaagcagaagttccataaagagtcagaagatctttagcagataaaaaatcatcttctactgcctctttctttatggtgtagggacgaattaaggcaaagatcaaaaagccaatggataaaaaaccactaatgttgatggaaagtaaaaagcgccttgcaaatctgtcgaggggaaccaaatcagagctccccaccaaaaagtaattctgaaatccatatctaatagattgctgccaatgaaaatcgataccaaaatgtttcttatccaaaaaatagaatcccagaatgctgtatattaaaacagctgccatagtaattaaaactgtttttaatccgatactctgcaagtgcgaattgctcttgatataatattcttttctggtaataattaaactgataaaaacaatcaaagcgattactgcttcttcataatcaatggcctttgtgaggtgtccgatcacagaaataccgcttaagaaaatggcagaccaccaggcatttcgcaaacctttgagcataaatgtcgcatttaccaacatgaataaacccgcagttatcacaaaatcatttgatgctttaatagccgagacaggaataatgtttctgagaatgtgcagtcgttctgaaatagccggagttaatacagacactatatttattaaccccagaacaaaaagtaaaaacgatggcaccacccgcatcaataaggtattcgcatgaaacaaaaaaactagtgcccctgcaactaatggaatccaaaattcgaagaaacgatacaaaaaagtgatggcaatagcactaacattatcaaacccgaattgtattaatataaaactcatcgagatttctatagcccctaaccctctcaaaaaaggagaaacgattaaaaaaacaaccgaaacaatgtatcctattacagcggcaggcaacgacggttcaaaccccaaagcaatcatcgcaatatacaaatgagctattccggcaaactcgatgagtacggaatacaaaacaacttgcagaaatttcttttttaagattctgttttgttgcaaatcatctaaaaagacaactgcagaaggaagaagttttataacgagacggtacagagaccctttttttaatatcgaatcataaatcagaaaaacaaacaaagctaagatcacaaccgctcccagggcatatcctacaccagaccccgcagttccctcaaataaagagtaaattaacgccggtattgccacaataataaccgagagtatcccgacaaaaccataaactacagaagcaaaatgaatttgagttggttttacaccgctcttttcaatggattttgtaaaaaaagctaaagaagaaattcctcccgccggcaaaaaaacgcttacaaaatttcgcttgagaaataaaacaatggcctgtttaaaagagatcccactttgaacagctttaaaagaagcaaaatacattaacgcctgaagagatacatacaagaaagcaagagcaattccgcacgaaacccaaaaaaagctggcattggtaattacagtattaacttctactaattccgaacgttcgtgtttgataaaccagattccgattccaataaaaaaaatagtaaatacaaactgtctgataattttatcattctcacgtaaaaaagagactccctttctgtctttaaaaaaactaaaaatgctattggaaatcacttgtgtcttcatattacagcgattaatttacttatgaaaaatgaaacctgtttctatataaatatacaataattatctatctatcaatcatttaacctgctatttttctcacttttacaaaccatgaaaagctaaggctaattatgactacagctaattaactttttcggatcaagaacaaaagttggtaaaaaggactgaaagccagaaaagcgcgagcatagtgcaaagcgctacaacttcgattaaggtgtagaattatcctgaaagggcaaaagcaattttcaactccaacaaatcccaataaaaaaagcattcttagagaatcaagtactaaatataccggatgcttttctttgcggacaggcttttgccctttcagggcgtaacctacaattgccatcatcattcatagtactacgcacgatgcttttgccatagttccttcacagcaaatccaaatttcaatagtgctcctgtcacaattgaaatttggattcaaatcttttcctacgcaaatcaaataatcagatttgcattctatgcggcttacaaaaacaaaaaagactgtcttctcagacagtcttttaaaatatttttagtggtgtagaacttcttcaccttctttcatcggtacattttgcggtacaaaatctacatcgtgattcgggttactgtagtcatacggccaacggtatacgtgaggaatttcacctggccagttaccgtggatatgttctacaggagtagtccactctaatgttgttgatttccatggattctgaactgctttcttaccgtagaaaatactaacgaagaagttgtataagaatactaattggaacgcacctcctacaagagcaaatgttgtaattaaaacattcacattttgtaaatcatcaaataatgggaagtttgtgtttgtatagtaacgtcttggtaaaccagctaatccgataaagtgcattggaaagaatactccgtaagcacaaactgctgtgatccaaaagtgaatgtaacctaaatttttattcaacattcttccgtacattttagggaaccagtggtaaataccagcaaacattccataaagtgcagaaatacccattactaagtgaaagtgagcaattacgaagtaagtatcgtgaacgttaatatccagcgtactatctcctaaaatgattcctgttaaacctccagtgatgaaagtagaaaccattccgatagagaataacattgcagggttgaattgtaagttacctttccataaagttgtgatccagttgaacgcttttacagcagatggaattgcaatcaataaagtagtaaaggtaaatacagatcctaagaaaggattcatacctgaaataaacatatggtgaccccaaacaattgtagataagaatgcaattgcaagaactgacataatcatcgctctgtaaccaaagataggtttacgagagtttgtagccataatttcagaaacaagacccatcgctggtaagattacgatgtaaacctcagggtgtcctaaaaaccagaataagtgttcgaacaatactggagaaccaccttggtagtgtaaaacctctccggcaatatagatatcagataagaagaatgaagtaccaaaacttctgtcaaagatcaataataaagcagctgacaataatacagggaacgaaataacaccaatgatagctgttacgaaaaatgtccagatagttaatggaagtcttgtcatagacattccttttgttctaaggttgataaccgttacaatgtagttcaaagatcccattaaagaagatgcgataaagatagccattgaaactaaccataaagtcatacctgttccagaacctgggattgcttgtggtaaagcacttaatggtgggtaaattgtccaacctgcagatgctggtccagcttcaacaaataaggaacataacattactacagcagataagaagaacaaccagtatgaaatcatattcataaatccggaagccatatctcgcgctccaatttgaagtggaatcaataagttactaaaggttccgctcaaaccggccgtcagtacaaagaataccatgatggtaccgtgaatggtaaccaaagccagataaatatcatttgccattacaccatcaggtgcaaatttatctcctaataaaacattaaaaattttaaaagactcttctggccaagccaattgcattctgaaaagcaacgacattgcaataccaattactcccattacaatacctgtaagtaagtattgcttagcaatcattttgtgatcaatactaaagatgtatttagtaatgaaggtgtctttatgatgatgttcgtgctcgtgatcgtgtccgtgatcgtgaccgtgcgcttctgctgacatatatgtgtactttaaattttcttaataaatattatttcatagccactttagctacaactgctttaaccgtatcaataactgctttcacagtatctttagcagtactatcagtgctcgcttttgcttcttcaccagcctttttttcagcatctgcagcagcagcggctttaatatcctgagctaatgtagttttttcgcttaaccattttttataatcttccggagtatccacaactactttcatttgcatgttgtagtgagaagatccacagattttattacataataataaatagtcaaatgtataaggatctaaagctgttccacctttagccactaactcaacgcttttttcagctctaagtttattgatgtgtgcaactttctccaccataaaaggtaactctctgtattcagaagtagtgtacgttggaataaaagcaaattcagtaaccatacccggaacacagttcatctgcgctctaaagtgaggcatgtaagccgagtgcaatacgtcttgagaacgcattttgaaatgtacttttttaccttttggaatatgcaattcagtaactacaatatcatcctgagcattaggatcagacatgtcaactcctaaagtattaacaccttcgattaaacgaacgtttgcttttcctaaaacattgtcctgaccagcatatcttgctgtccatttaaattgttgagcgtataattcaatttcgattacatcctcgtctttatcaacaaacataatgttgttccaagcgtataatccgtaaagaattaaacaagccaaaactacagatggaataatactccaaattgcttctaatttattactatcagcaaagaataaagcttttttatctttatgtcctctgtttttaaaagagaaccagtataataaaccttgtgtaataaactgaactacaaaaattaaaacccaggtaatattcattaaattatctaccaaaagtccgtgctctgaagccggagtgtgaagtgctaaaccaccccattttagtaaaccgtaaatcgtaaagatataaatgaaagccaaaaagccaaacataacatacccctgaacattattatcattatcagatgctacttgcgaatcgtccgaagaagaggatcccacctgcgtaagatcgaatatcttggtcaattgccacaatgcaactgctaataaaactaaaactataattaccaacaaacttgtcatctgtttacttctttaaatattaataatgaaaatgtttactttcttcaatgaaaggatttctttttgctaacaaaggagctttagttaatgcagtaaatacgacaaaaataaacaaacctaagaagaaaagaatagatgcaatttcagaaactccaataaaccatttatctccaactgtaccaggcataatcatattaaagaaatcaacatagtgtcctaacaagatcactacaccagccattacgataacccagttaagacgtttgaagtctgtattgatcaatattaataatgggaacaaaaagttcataactacagctccaaaaaatggtaagttgtataattgaattctagttacgaaatacgtaacctcttcaggaatattagcgtaccagatcaacatgaattgtgagaaccataagtatgtccaaaatacactgataccaaacatgaatttagctaaatcatgaatatggcttgtgtttacatattctaaatatcctttagattttaagtagatcgttactaatgcgattgtagtaataccacttacaaagaaagaagcaaaaacataccatccgaacaatgtactgaaccagtgtggatcaaatgacataatccagtcccaagacataatagactcagatacgataaagaaaactaagaatcctgcagataacttaaagttctttttgtagtatagatcatctttagcttcgtcctgagccaaacagttttttctggaatagtgacggtataagttccatcctattaaaaagattgctgctctgatgatccaaaatggaaagttaaggtaacctgcttttccagcaatgatagcatcataattagcatgttttggatctgtaactccttctcctaaccaaacgaaaatgtggttaaaatgtaatccgcaaagtactaaaataataaagaatataacagaaccagctggtaaataacctgtgattccctgcattactctaaacaataccggagaccaacctgcctgagcaacttgttgaatagcataaaatgctaaaactcccatagaaagtagtaaaaagaaaatacaagcaacatataatgctgaccatggtttgttttgcaattggtgcaatacatgctccaaatgtttttcatgttcacctgcggcatcaactttcgcatgctctccaccttcgtgtgagtcatgtgaaacttttgcagcttcatgagaaactgctggagtttctgcgtgcgctgcacctttaagtgaatcatgtgaagcttctgctgtatcatgtgaagctgccggagcttctgcatgtgcagcaccttcatgtgaagcttctgtagcttcatgacctgcagtttcatgagaagcttccgcagcttcaccatgcgcagcaccatgagaaccatgagcatctgcagctagtattttttcaacttcttgaatatctttaggtgcatttaaaaaaccatacccaattcctaataggccaagaaccattaggacgatagaaaaagtttttaatttacttgaaaatgtatacatatctattacgatcagtttgttcaacaattataattggctttttagttttagaacatagtcagcaactaaccaacgttcgtgggcacttaattgatttgcatgtgaacccattgcatttaaaccataagtctcaacgtgaaagatactcccttcagtgattactctgtctttgtagctaggtactccaagaaatttttctctttcaaccaatttacctttaccgtttccagttgcaccatggcagctgatacaataaatttcaaaaagttcttttcctttttcagaacttttttcagcttcagtcaaaggtgattttaaatttgctttcgctaattcataaccagcagttgaattctcatactcataaggttcaaaacctctgttgatagttccttctacaggaagctgtccttcttttcctcctttaaatatttttgcttctgtatagggctcgtaagcaacagattcatacatatttgggaaatactgatagtttggtgccgaattattgtggcaagatgaaactaaaatagttataccaactaaaagtgttattttatatatccttttcatagctacaattaattcttttcgattactttaacttcaacagctcctgttccttcgaaaaaagaaactaattctgcttcgttatcatttacagcaacttccattaagaaatggtcgtctgttgttcttacatcaggattttcagcttgtttgaatggccacaatctacttctcatgtaaaaagtgattaccattaagtgggcagcaaaaaatacagtcatctcaaacataattggcacaaaagaaggcatattctgaatgaaactaaaacttggttttccaccaatatcctgaggccagtcatgaatcatgatataactcatcatgaatgttgcaacagaaataccaacacatccgtataaaaatgcacaaattgctaatcttgttggtgctaagcccatagctttatccaatccgtgaactgggaatggagtaaaaacttcttcaatatgatgatgagcagctctggttttctttactgcatccatcaaaatatcatcgtcattataaatggcgtatattactttattactcatggtgtgaatctttatttgctgctctttctctaatataattatctcctgttcctttcaaaattgttttcacctccgcctgagcaattacagggaatgttctggagtataataaaaacaatacgaagaagaaaccaattgttccgatgaaaattccaatatcaacgaatgttggtgagaacattgtccaagaagatggaaggtaatctctatgtaaagaagtaacaataattacgaatctttcaaaccacattccgatgtttactacaatcgaaataatgaaggagaacatgatacttgttcttagttttttgaaccacatgaactgtggagagaaaacgttacaagtcatcatcgaccaatatgcccaccagtaaggtccggtagctctgtttaagaaagcatattgctcatactctacacctgaataccaggctacgaataactcagtgatgtaagcaacacctacgatagaaccggtgatcatgataatgatgttcatcaattcgatatgttgtagtgtaatgtaagcttcaagatttgaaacttttctcataacgatcaacaaggtgtttaccatcgcaaatcctgagaataccgctcctgcaacgaagtaaggagggaaaatcgtggtatgccatcctgggattacagaagtagcaaagtccatcgatacaatggtgtgtacagaaagtacaagtggagtagctaaacctgcaagtactaaagatacttcttcaaaacgctgccagtcttttgctctaccgctccatccaaaacttaggatagaatatactcttttattgaaaggtgttattgctctatcacgtagcattgcaaagtcaggcaataaaccagtccaccagaaaactaatgataccgaaagatacgttgaaattgcaaatacgtcccaaagtaatggcgagttaaagtttacccataaagatccaaattgatttggaataggtaaaacccagtaagccaaccatggacgacccatgtgaataattggaaataaacctgcctgaactactgagaagatagtcatcgcttcagcagaacggttaatagccattctccaacgctgacggaaaagtaataataccgcagaaattaatgttccggcgtgaccaataccaacccaccaaacgaagttcgtgatatcccaagcccaaccaactgttttatttaatccccatgttccgatacctgtagatacagtgtaaattatacaacctaatccccaaaggaaggctattaatgcgattgaaaatacaatccaccattgtttgtttgcaggcccttcaacaggtgcagctacatctactgttacatcgtgataagatttatcacctataactaaaggttttctaatgggtgcttcgtagtgagacgacataatcctttatattgtttctaattaataattttactaagtatttctaacttttacatgatagaaaacgttcggttttgtaccaacatgctctaataaatgatacattctttcgctttctgctaacttagcaacttcgctttctttatcatttacatctccaaacaccatagctccagaagaacaagctgcagaacaagcgcaagcattgttgaattcatctttcgccacaactcttccttcacgttttgcctgaagaataacagcttgtgtactttgaatacagaatgaacatttttccataactccacgagaacgaacgtttacgtctgggtttaataccatacgacctaaatcatcattcatgtgatagtcgaattcactgtttttgttgtacaagaaccagttgaaacgacgtactttgtatggacagttgtttgcacagtaacgagtaccaacacatctgttgtatgccatgtggttttgaccttgacgaccgtgagatgttgctgcaaccggacaaactgtttcacaaggagcgtggttacagtgttgacacattactggctggaatgcaacctgtggattgtctcctggtttttccatttcattaaatgtagataatgaacttgataaacctgcaattccttcttttctttcgttatcaccttcaaaagtgctttcagaagaatagtatctgtcgatacgcaaccagtgcatatcacggcttcttcttacctctgctttaccaacaacaggaacgttgttctcagcgtgacaagcaataacacaagctccacaacctgtacaagcatttaagtcgatagaaaggttaaagtgatgtcctgtagaacgatcaaatgattcccataaatctactgttgtagctttaacttcctggtgatctaaagataccattggctgtggattccaatgttcagcattttctttgttaaatacatcaagggtagtttctttaatgatatctcctctacccattaatgttttttgtccctgaacacaagcaaactcatgctctccatttgctttcgcaatagaaacagactgaacactattgaaatttttatataaagcgtaagcatttaaacctacctgcatttcttcttttaacgctgccttacgaccgtaaccaactgctaaaccaactgtaccaacagcttgtcctggctgaacaattaccggaacgttttctaatttagccccgtcagcagtagtaatagtagcataacttccgttcaaaccaccattagcaacgatttcatttgataatcctaattttttagcatcagcattagaaacagtaacatagttatcccatgaaactctggtaattggatccgggaactcttgtaaccaagggttattagcatgttgtccatctcctaatcctgttttagtatataataccaattcgaaatcaccggcagctttagattttgcaagtgcatttgcagcggtagcagcatcaacagcacctccagacaatgcagaagatccaactactgcaacaccatcatgtaatactttgttccaagaagatcctgcagtaaatgctgaagaattaacttttaaataatcataaaaagtacctccggcaccatttaatgacaataaaacatcctgaaattgtttggtattaaaaatagggcgaatcgttggttgcgttaagctataagttccgcttgttatttctaaatctccccaagactctaaataatgaggagccggagcagcaacagtaacaattgaagcagtttcatcttcttttaatgaaaaagcaacagatgttttaacttttttcaatcctgaaacaaaagcagctgaatcagctaaagtgtaaacaggattaactccactcataattaaagtatgaacacttccagcattcagatctttaattaattgagaaacaacagcattcgatccttttctaatttgtcttgctcctgcagtagtataagcttcactcgccaatatttgattgatagctaaaactaataactgagcatttttatcttcaattccggataccagaacccctttagatccggcagcttttaattgctgagcagctttcactacctctgctttataagcagcatctaaagtaacaggaacagaagcacctgcaataatgttatatatttgaactaaagcctgtttttgaacagcagtagtcattggaacacgcttatcagcagcggctccggataatgtcatatttgattcgaattggaaatgacgggacatttttccgttttgaggaatacgtccttttgcatatccactatcgtatccaccaccttgccagtctcctaagaaatcagctccaacagatacaattaagttagattttgaaaaatcgtaatcaactaaagctctttgaccatatacagcctgaaaagcatctaaagcctcagatgaagaaactgcatcataaacaacatgcttagcatttggatttttagcaataaattcagcgattaatttttcagtagatggacttgcaagtgtatttgttaataataccacctgttggtttttagcttttgcttcagctaaacttgatttaattttcaaatcaacagccgaccaagtagtttgtttaccatctgcttttggctcttttaaacgagcgctatcatacaatcctaagatagatgcgtgaattctcgcattggctgcaaatttagcaccagcgattgcattgttttcaattttaattggacgaccctcacgagtttttaccaaaagattagcaaaatcaaaaccatcaaatacagtagttgcataataatctgcaacaccaggaatgatttgctctggttgtaaaacataagggatagacttgtgcacaggaccttcacatgcagcaagtgtaactgccgcagtactaaatcctacgtactttaaaaagtcacgacgtgaagttccagatgaagctaaagcatctgcattccctaagaattcatctgtaggaatctcttcaacaaactcgttatttctaagcgcctcaacaatagaactattttctagttcttcaacacttttccagtattttttgtttgatgacattgtatataaatattaaaatcttaataattcgattaatagtggcatttaccgcattctaaacctcccatttgcgctgcagttaatttctctacaccgtattttttagaaagttcagcatgaattttatcatagtatgcatttccttccatcttaacatcagtttttctatggcaatcaacacaccatcccattgttaatttagagtattgcttcatgatttcaaattcttccacaggaccgtgacacgtttgacattcgatacctccaacagtaacgtgttgagagtgattgaagtaaacaaaatcaggcaagttgtgaatacgaacccattttactggttgcgtttttccggtataagcttgctttgccttatcccaaccaactgcatcgtataatttttggatctgagcatcgtaaaatgccttgctgtactcaggagtagcagtagtttcagcaacttcagagatgtttttatgacagttcatacaaacattcaaagatggaataccagcagtcttacttacacgagcagcagagtgacaatatttacaattgatttcgttatcaccagcgtgaattttatgagaatagtgaattggctgaattggctcataattttgatccacaccaacttgcattaagtatccgtacacaaaatatccacttgccaatagcaagaatattgcagtaactaataccaagaactggtttctagcgaatgctttccagataggagtcgtagcttctttaggagcaactacaattccattattactagccactttagtcaatactttgttcaccatgaacaacattaccaccaagatagccattacaagtgcaagtgcacctaaaataatattgtttgaaataccaccaccgtcaacgtttgttcccggaggagttgcagctccaccaccagcaacagctggttcagcttttacttcagaagtataggcgataatattatcaatatccccctcagataattgaggaaaagaagtcattactgacttgttgttttcttcaaaaagcttcacagccacagcgtcacctgacttaatcatgtcagaactgttgtgaatccatttataaagccaagctttatcatgcttttcagcaactccccttaaagcaggaccagttgatttggcatctaatttgtgacatgcagcgcaatttgcattaaaaagttctttcccttttaccggatcaccaccagcagttgcagccggagcagcagcagcttcagtcgccgcaggagcagctggatcttgagcaaatgaagttagggagaaaatcagcgttagcgataagctaagcagcaattttcttgagatcgaattatggttacccacctttttcatatagtataataattatctactaatttttggtatgattttttctgtagtaaatcaacaaaaaactaataccttcttttaaaacttgcacaaaaatacgacttatgtgttattctcaaaaccttaaaatagtcttaaatatcaatttatatcaattctaaataatatcaaattttcacatacaatttttaaatagtatttttgctcaaaaaccaccacattatgagaattttaaccccatctaaaagagttttcttcacgctaacaatgatcactttagcttacaacattcaggctcaggatcaaaatttaacactaaatcaggatccaaaatttgagcaattattgaatgataaacgcaaaattaacacatcaataagtacaaacgatacctataaaattcaaatcttcagcggcaaaagcgaagaagcaaagaaaacgttatcggatttcaaaagagaatacagcaacatcgacggaaccataattttcaacaccccaaattacaaggttattgttggaaatttcaagaccagaatagaagcagaaagaaacctggcagacatcaaaaagagatacaaaagtgtttttctactaaagccagggaagtaaattctcaattaaaacagaacaatcaaaaaaaagggcagcttcacaatcgaagttgccctttttcgtatgatttacatccaactgcaagaacataagtttcaccagcaaactacattccttcacaacaaacatcacccattagttttcattgatttcaacacctgaaatacctcttccttaacctgcaataaatcagtattgaaagcggtattcacacgaagacaatccacagtagcctttcccatttccctacctttcactacgtcactatgccaatgcacattacaaatcaaccgactttcaccaaagtcaagtccccgctcaagaattaccttctccttatccggaaagatttcactaaacaccaaagcccatgcccagcctacagcagcatgtcctgacggaaaacagcctactttacgcagtacctcttccagctcgggagtacaagttttttgcttgttaaccacaaagggccgttcgcgattgtaaaaattcttcgccgtatacgtcgacaatcttgcatccgtcatcacccgacgcataagcaaatacaacttaggcgtaagcacctcattaatatcaattcccaaagtagcctcaaacgatctaaccgcatgcggaaaagacaaattggcatcactaacagcctgcaaaaaacgaatctggtctttagattttgacactctcctggcatactccaagtcgaattcaaaaacagcagaagcaggttcaggaggcggagccaacaacaccaaactatttggcatttcaccatcagaaagatacccatacaacaagtcaggcatttcaactctcatctcttccacatttacaaacttatgcttagccccgtcagacttgccccttttgtcaaaaagacgggtgatactattaaataattttagtcccatacgaaatacgcaatcaattcagctttatctctttttgcaaaactaaaaaaaatcttacaaataaatcaattccacctctcacaaaaccaataaacattccaactttctcttccatattataaatggaaacacgataatctgaaatttgttccaataaaaaagtcccaactttcgctggaactttagaatataaacacgggacagtacatcaaaaaaaacttttaattcaccaccttaattccatctgccataaaccgtatttcttctttcggcatcttgatcgcatcaatttcaacctttgattttttagcatctttagcataatgcttcaactcatcaacagaagtgattttcttctcggccgtaccttccaaaacaacatttttaccttttaaggccgttggcacaaaaaaagcatagtccttcattttcacaaaaaaggaagatccatcttctgttttaacagtaacccagcatcctttcttcggacaaacatcggtcacaactccttttactgatatattttcagctttattagcagtttttaagtcgtttttcaacttctcaaccgtgatcgctttgctttctgaaattttcgaaacatcggcaccgtaatgatctcccactacagcatttcctgccggaggagcacttttttcaactgcttcctgcgaaaaagacactgaagaaaaactcgcagaaagaacgattgcaaatataaattttctcataattaaatattttttaatcaaaaatagcattaaaattgaaataaacgaaaatattaatgacacctcatttttttaaacactacaaacttcgtttaaatattcccacaaaaaaagtcccaactctcgttgggacttttgatataagtattgattattatttcaatttctttttgattgctacctcgtggtaagcctcaataacatctctttcttcgatatcattgtatcctttgatctgaataccacaatcgtatcctttagtaacttctttaacatcgtctttgaaacgtttcaacgccacaagctcacctgtgtgcaccactactccatctctgattactctaattttagaagttctcataatcttaccgtccatcaccatacaaccagcgattgaacccactttagaaattttgaaaatctcacgaatttcagcagttcctaaaatttcttctttcatctcaggagctaacattccctccattgcatcttttaagtcatcgattgcagcgtagataatagaatagtaacggatatcaatttcttctttatcagcaagctgtctcgcatttcctgcaggacgaacgttaaatccgataatgattgcatcagatgcagaagccaacataacgtcagtttcagtaattgctccaacacctttatgaatgatattaatctgaatttcttctgtagacaatttagagaacgaatctgataatgcttcaacagatccatccacgtctcctttaaggattacgttcaattctttaaactgaccaagtgcgatacgacgtccaatctcatctaatgtaatatgacgttgtgtacgtactgattgttcacgcattaattgagaacgtttcgaagcaatttgttttgcttctttttcgtcttcaaaaacgttaaacttatcaccggcagttgcagctccgtcaagacctaaaacagataccggagtcgaaggccctgcttctttaacaatatgtccgcgttcatcatgcatagctttaattttaccatgatgcttacctgccaacatataatcccctacttttaaagttccatgttgaactaaaatggtagacacatatccttttcctttatctaagaacgcctcaacaactgttccttgagccgctttgtttggattcgattttaaatctaagatttccgcttctaataaaactttctctaataattcttttacacctgttccaacttttgcagaaatatcatgcgattgaatttttccaccccaatcttcaacaagtaagttcatactagccaaacgctctttgattttctcaacattagcatttggtttatcaattttattgattgcaaatataattggaactcccgccgcttgtgcgtgagaaattgcttcttttgtttgtggcatgatatcatcatccgcagcaacaacaataatagcgatatcggtaacttgagctccacgtgcacgcatcgcggtaaacgcctcgtgacccggagtatctaagaatgctattttctgaccgttatctaaagttacgccataggctccaatgtgctgtgtaatacctccagactctccggcaataacattttctttacggatataatccaataaagaggttttaccatgatcgacgtgacccattactgtaacaattggcgctctaaccactaagtcttcttctttatcttcaactacctcgatagcttcttcgatatcaaccgtgataaactctacttcgtaaccaaactcatccgctacgattgttagagtttcagcatccagacgttggttcatggtaaccatgataccaagagacatacacgttccaattacttttgtaatcggcacatccatcatgattgcaatttcacctaccgtaacaaactcggtaactttaattgttttacttccttcgtcaagtgctctttgctcatcatctgatttttgacggtgcgtttctcttttatctcttctgtatttagcagctttagattttccacctttaccctgaagtttttcaagagtctctctaatttggttttttacttcctcttcagttggctccacttttgctacaattgcaggacggtttccttttacaaaacctggtcttgcacttctgtttgcattaaaacctcctccaccagtatttggtgtaattttattagggtttggagttcccggcgcattacctgttgcaggttttggcgcacccggagttcccggtttaggagcgattcttttacgcttatttttattagcgttatttccggctcccggagctcctggtttattaggagttatctttggatcttctttctttttcttaggcttattgaattgagacaagtcaattgtctgcccggtaagagtagttccagataatttttgatattgtgtagtaattatttcctcagcagtgttaggatcagttgaaacaaccggttcctgcgctacttttggagactctacttttacttctttcttctctgtaataataggtttttctacctttttctcttcagaaactacaggagcaactaccggctctggctgtacaatttctttttgaacaggtttttctggttgagttggagtaacaactgcttttggctcttcggttttcactggttcctcaacaggagtagaaacaattgcaggtttcttcgggtttaaatcaattttacctacttgaacaggtcctgttacaacagctctcgcttttataacctcctgttgtttttggcgctcttcgtcttgtctgcgtttgtcctcaatttctttctcacgttcaacacgtaatgcttctttctcttttcttttctcttcccctacctctttagaagcttccttattccccttatcgcccgcaaattggctttgtaggatattaaattcgctatcagaaatttttgcattcggatttgcatcaatagcaattcccttatcttttagataatcaacagctctttctaacgaaatatttaattcccttaaaaccttgtttattcttattactctctcttcagacatataacctttttattattacctttttcgttgtgttgttagagcagacaactaactgtcaaactcttcttttagtattttcataacatcaagaatagtttcctcttctaaatctgttcttcttactaaatcttctacttcctgctttagaatactttttgctgtatccaaaccaattttagcaaattcttcaattacccagccttcgatttcatctgagaattctgttaattcaacatcatcctcatctgccgttgctcctgcaacatctccttcacgaattacatctaactcgtaacctgttaactgacctgctaatttaatattgtgacctcctctaccaattgctttagaaacttcttctaatttcaagaaaacttcagctcttttattttcttcgtcaattttgatagacgaaacttttgcagggcttaaagctcttgtaataaacaattgaatattgtttgtataattaattacatcgatattctcgtttcctaactcacgaacgattccgtgaatacgagatcctttcatccccacacaagctccaacaggatcaattctatcatcataagaatctaccgctacttttgctttttctccaggaatacgcactacatttttaactgtaatcaaaccgtcgaatacctcaggaatttcctgctcaaacaatttctccaaaaacttctcagaagttctggacataatgatttgaggtttgtttccttttaattcaacgctttcaataattccgcgtacattatctcctttacggaaaaagtcagatggaatttgtttttcttttggaagtacaatttcatttccttcatcatcgaccaaaattacaactcttggacgtacgtggtgcacttcggcagtataaatatcaccaataatatctttaaattgcttgtaaagatttgtattatcgtgttcgtgaattttagatattaagttttgacgcaaagccaaaatagcccttcttcctaaatcaatcaatttcacctcttcagaaacctcttcaccgatttcaaaatcagcttcaatcattcttgcttcagtcaaagtaatctcttcgttttcgaaatccagatcttcatcagcaacaattactcttcttctccagatctccatatctcctttatcaggatttataatgatgtcaaagttatcatcagaaccgtattttttctttaatgcatttctaaacacgtcctctaaaattgccataagcgttacacgatcaataagtttattatccttaaactctgagaatgaatcgattaatgctaaattttccatgcgaattctttaattaaaatgttactgtaacaattgcctccttaatatctgtataaggtatttgttgctctttttgaactgtttcttttccttttcctacttttttcggttctcttgctttccaagacaaaattataaaaacatcgttagcttccaccaattctgcctcaattttttcagtatttgtagtaacaatcaacgttctaccaatatttttaatgtattgtcttgtcattttcaaaggcgatcctactccaacagatgctacttcaagcgaaaaatcctgctcttcacgatccagattattctcgattgcacgacttatgtcaatacaatcctgcagcgccactccattatcaccatctaaaccaacactaattttaaaagagtctgacacagccagatcaatcaaaaagatcgatggcttctccagaagagcttctgtaattaatccgtttactttttctttaaatgtcataattttataaaaagaggggacacttagtcccctcattatttagattttaataaataacggtgcaaatatagtgttttttttataaatcaaaataaatagattaacctaaaaatatttcttatctttataataatcgattttttaactattcaagccctaaaacaccatgaaaagaatcctagtacctaccgatttctccgaacatgcagagaacgctttaaaagttgcctcacaaattgcaaagaagaataattctgagataatcattttacacatgctcgaattaccaagtcaaatgaacgatgccgttttaggcggagcaagtattcccgaaacaatgcttttcatgaaaaaagccaacgaaatgttggatcaggtttcatcaagaccgtatctggacggaatcccaattacagaaattgtaaaaatagacaaacccattcacggcatcactcaggtaagcaaagaatacgaaatcgatctgatcgtaatgggatcacacggatcatccggcatagaagaactcttaattggatcaaacaccgaaaaagcagtccgaaattccgaaatcccggtcctgataatcaaaaaagacactgccaacttcaatgcctccaacattgttttcgcctcagacttttcagaagaagccaaaaaacccttcaaaaaattcctgaaattcgccagtgtctttgactctaagatacacttagtcaccatttgcactccgaacagcttcaaaccaactcatgaattacagaaaacaatagatgcctttgtaaccgaatttaacctgaccaattactctgctcatatctacaacgacaccaacatcgaaaaaggaatcatcaacttctccaacagcatcaatgccgatattataggaatgtgcacacacggaagaaccggctttgctcattttttcaacggcagtatcagcgaaggacttgtaaatcatgccatcagaccgatacttacttttaaaatttaaaaaaaaaataaacacataaaaaaagcctctcgattgagaggcttcttatgttggtctactaggactcgaacctagaaagactgcaccaaaaacagttgtgttaccattacaccatagaccagcagtgctgttaagcgagtgcaaatttagagctttatttagtttgtgcaaactttttgagcaaaaaaaatcattttttactgtttttttttgctcaaaatccgtaacacatttacaagtatttcacaaacaacaccttacttcaaccaaatacttttacagatttttttgttaatgctcgtttctttaaacaaaaaaacattttctttgtacgatagaaaaattacaaaattttaacacctaaatatggcacaattcaatttcaataaatggaatactattattggttggtttgcatttgcaatcgctttaattacttacaccttaactgttgaacccacgatgagtttctgggattgcggagaatatattgccactgccgcaaaactggaagtgggacacccgccgggagctcctttatttcaaatgatgggtgcttttttcgcaatgtttgcgacagatgcacaacatgtagcggtaatggttaatatgatgtcggttttttcaagtgcctttactattctatttatgttttggtcttcttctatgattttgaaaaaaatcgtagcccgttttgccaaaatcgaccaaaacaattcaattgttattttaggaagttcttttgttggagcccttgcctacactttctcagacagcttctggtttaatgctgttgaagcggaagtttacgcgatggcctcccttttaattgccttgcttttctggcttggtttacgttgggaacaagatatggaccaaccaaaaggaaacaaatggttattgatcatttctcttgttatcggactatcgtttggagttcactttatggctttgttaaccattccttctattggttttctgtattactttaaacattacgaaaaagttaccatcaaaaactttcttattgccaatgttgttgtaattggtgttcttctctttatcttcaaattgcttttacctttaacaatggaggcctttgctgacactgaagtttttatggtaaatagttttggattgccttttaactcgggaacaattttcgtaacgctgatcctaatcgccttcttctattttgggttaagatttaccaaacaaaaaggattaattttttacaacactattattctttgtgttctttttatatttattggattctctacctggataatgctgcctgttcgcgctaatgccaacaccgtaatcaacgaaaacaaaccttcggatgccgcagaagtactggcgtactacaatcgtgaacaatatggagtaaatcctcttttttacggacctcagtacacggagtatttcgcaggccttgatgccaaaaatccttattcagacaaggctcctaactacgaaagagattacaaaacaggtaaatacatcattaccaataatttcaaaaacgctcagcaaaactctgacgacaaccaaaaaacgattcttccaagaatgtggagcactgaaatggggcacattcaaaactatattaactttacgaccccgcctaacttccgaataaacccaaattatgactacgagcaggatttaggaaaatacggaattgacgccagtcagttaactgaagaagaatacaacaaagctacagctcaattgcgaaatgaagttgaaaaaacaatttcagaatttagaaaagcttatgctcaaaaacaaattgataacgaaggttatgtgaaattcttaaaaagctatggcgattacctgattatcgaaaaaccatctgctgtcgacaatttcagtttcatgtttgaataccaatttggatatatgtactggagatatttgatgtggaacttcgttggacgtcaaagcgacaatcaggggaaatacgataatattgacggaaactggattagcggaatcaaagcacttgactctttacatcttggctcacaagacaatttaccttctgatgttaccaacaataaaggaagaaatgtttattacttcctgccatttattttggggcttatcggattaatgtaccatgccaacaaggacttaaaaagtttttacgtactattggctctattcttatttaccggaattgctttaaaaatatacctgaacgaaagaccttttgagcctcgcgaaagagattatgcattagtaggatctttttatgtgtttgcgatctggattggttttggtgtttattcactttacgaaagcattcaaaaatatatcgcccctaaaattgccggcccaattattattgccggaagtttgttagctgcaccgattttaatggcttctcaaaactgggacgatcacgacagatccggaagatatactgcagttgcaatggctaaagcgtatttaacttcttgcgataaagacgctattttatttactattggagacaatgacaccttcccgctttggtatgcccaggagatcgaaggcatcagaaccgatgttaagatagtaaacaccagcttatttatgaccgactggtacattgatcaaatgaaagcgaaagcttacgaatctgatccgttaccaatatcctttacccatgatgaatatgtgggtgacaaattggactatgtagctcatattcctaaaattgacacgcgttggaacatcaaagattttattgattttattaaaaatccaaaatccacagtaggtttacaaaacggacaaacgatccatttttaccctacgaacaaaatcagagttcctattgacaaaaatgtgattatcaaaaacaaagtcgttaatccgaaatacaacgactctattgttccttacatggatatcgacatcaaaggaagtgctttatataaaaatcgcttaatgatgctggacattttggccaacaataactggaaaagacctatttattttagcggaggagcttttgacgacgaagattacttatggctgaaaaactatctgcaattggacggaatggtttacaaattagtacctattaaaaatatcccttcaaaagacggaggccctatggatatggggcaaatggatgctgataaatcgtacgatatcgtaatgaagtgggactggggcaatagcaatgggactatttatcacgatcccgaaaccagaagaaacagtattacctaccgtactaatttatcccgtttgatggatcaattgattgctgaaggcaaaacagataaagccaaaaaagtgatcgaactggcaatgacaaaaatgccggtagataagtttggttattattcgttagttgaaccttttgcaggaggatattacaaagtaggagaaactgccaaagcacacaatttactcaaccaactggttcagaaatacaaagaggaactaaactattacgccactctgactcctggtgaccaaactgacttagcgattgacatcattactgacattgaacgctacagaagtctattacaagtgatgaaagaaaacaacgatcttactttctatgagaagcacaaagtaacatttaatacttatgtaaatgttttcgaacgttttggaagagaaaaagaataataagatacgaaaaacatagtaattaaaaaaatgcagcgcagcttgattagtagcgctgcattttttaattttacatatctgtaaaccaaaacaaaatgagcttttattgggtaaaaacaaattcattcatcaagaaggtattttctaaatattgttgggacattccaaacaacgaaaagaaaatatatctcacctttgacgatggcccaactcccgagattacagactgggttttatctgaattgaaaaaatttgacgcaaaagccactttcttttgtattggaaaaaacataaaagcaaacctttctttgtttgaaaaactaatcaaagaaggacattctattggcaatcataccatgaaccatgtcaatggctggaaaagccacaccgatgattacattaaaaatgtacaaaattgtgccgctgttctggaagagaaaaaaacacgcaatcttatctttcgtccgccttatggaaaaatcaaaaaggcacagtccagaatccttcgaaaattaggatataaaatcatcatgtgggacgttttaagcgctgattttgaccagagcatcacacctgagaaatgtcttgaaaacgtaacaaaaaatgtgaaatcaggaagcgtaattgtatttcacgacagcataaaagcctcgccaaatttaaaatttgccttacctaaaaccttacactttttaaaagaaaatgggtatacatttgatattattcactaaataatatctttaagaagtagtattctataaattaaattgttcctgaacaattcctataatcgtattcgcatccagttctccggattgcctccaaatcatctgcccttctttataaatcattaaagtaggaagtcccttaatacgcagtgcttctgctaattcctgatttttatccacatcaattttgatcaccttggctttatcgccaagtgcagccgcaacatccttaattacaggatgcattgatacagatgattcgttccaatcggtgtaaaaatcaatcaacactggaacttgagcatttataagttctccaaattttgacataaaaccaaaaatttaattcttttttaatcttttaaaaagaggtaattatatacaaatgtagcatttttaacgaattaagccacattgttccccttttttagttcaatcacggttatttcgggcataatccctacacgccccggatatgcgtgaaaaccaaatccacgatttacataaacgtatcgacttacattttcatataagcctgcccattgtttataaatatactgagccagactccatttaaaataacccggaatttctatcccaaattgcatgccatgtgtgtgacctgacaaggttaaatgaaaatttttcggatgctctttaattacgtattcccagtgtgtcggatcatggctcatgaccactttaaaatcgccctgagacacattctgagaggctttatctatatctccgtacttcgcaaaattctttccccagttttctacaccaatcagtgcaattttgtcatctcctttttgaatgtatcggtgctcgtttaacaaaagctcaaatccaatttgcccataaaggctcttaatttcttcaaaattttcctttttatccttttcagaaggccaggttacatattccccatagtcatggttacctaaaacagaaaacttcccgtatttatagttttttattctcttaaaagtttccagccagggatgcatttctttagcatgtgtattaacaatatctcctgtaaacaaaatcagatcagcttcctgagcattgatcagatcaatagcataatttattttatccggattatcaaaacttccactgtgaacatcagaaatctgagtgattttaaaaccatcaaaagcatccggaagatccggaaaaaagacagtttgcttgattaccttaaaattgtattttccttcaaatatcccataaatcaaagaaagaaaaggaactgctgccaatcctaaggcgatctgactgataaattttctcctctcaggcatcatttccttttttggaacattatacacgaagtaattgacgatgctaacccctattctaaaaatatcttcaccaaacataaaaagcgtaagaacaatttttggcacataaaccaataacattaaccctgttgtaaacataaattgtttcgtttgtccaacagaccggtcaatttgcgaaaaagaataaatgataaaaattagaattagtaaacttataacctgataactaatcaaaacccatcttaacttgattaaggctcgaaatgcctggtaagaatagtactcaataaataatagaagagcacaaagaattagaaacttaaggatcattattttttagttttgaacaaagtaacaaagaatgaaaatcttatggctttttattatcaaaaatttaacgctgataataacaaaaagctgacagattactctatcagctttttctctaccaaatttttaaaaccttttaaaatccacaacatgtgtttaccgaaataaactatacctttttatttttgtgtttttgctgcttccggtttagcggctgcttcttttttcgcttttttatctgcttttttctcttttttaggagcttttgcttcttttacaggggctgattttactggagctgtttgagcgttcaccatcgcaactgttcctaaaacagctactgccaacattactaattttctcatgattttagtttttatgattattattatcttcatttattataccccaaagatattctcacaaaatgaagataaaatgaagattaggcctgtctgaaaaaattaacttttaattgtgtttttgccctcccggaaacaataatgtaaaggtggttcctttatcaatctcagacgtaacttttaattcgatatgatgaaaagaagcaatactctccgcaatagcaagccctaaaccctgcccctcctgatctgaactaagtctggcaaatctgttgaatatctgttctatttgaaaatcattcatcccaacaccggaatcggcaatagaaataaaatagtaatgatcctgaaaaccatccgcaacacttatgctgccctgaggtttattgtattttatggcattggtaaccaaattataaataagaatatgaatcagcgttttgtttcctgtaaaaacataatgatggttcattttattccaaaactgaatttctctgtcgtcgatacgatcctgtaagtcttcctgcaaatcggtgactatttcatgaaaatttatattctcgttggcttcatactgattgttttcgattctggaaatcaacaataaattattaatgatttttttgagcatatctaatgttttcaatgctcctgcaattttatcaatagcattatcatctaaagattcattttgcaataagttctcaaacttacttttgagcaatgcaattggcgttagcagctcgtgggaaacatttgatatgaactgtttttcttttttaaaaagctccgcaatacggtccatcatttggtttaaaacagaatcgagttctctaaaatcatgagacctgactttgattggggtatgatcaaaagcctcaggctcattgacccgccttatcttggtatcaataattttataaaaaggctttaataagtattcgatataaaaagtatctgccaaaaaagtaatcaataatatcactacaaaaacgataataataaaaaatcggatgataaaagtaaggtcttttacttctcccaaactgcttccaatttcgagctggtatccctgatttccgaaggtaaaatgatactgcaagattctgtattcgttttcttctccttcaataattcggtagtcattactaaaaacaggttttttctggtcgtgttttagagaagattttgagagcaccaaaaactcgctgtgaagggttgaaaactgtgaataggtttcggtcgaatcacctgaattttcaataaagtcatcgatttcattctgattcagatgttcaataaacttctgtttcttttcgagcagcccgttattgatatgcctgtacaccacattttctaccaaaataggcagcatcagccataaaataaaaataaccaacagtcttgtcagcgcattaaaaatagccaattgatgttttatcttcacaacctgtattctttattcgtttatacgataccctacatttctaacggtttcaaaccaatcaatttctgtatgcttgtctaatttttttcgaaggtttctaacatggacgtcaataaaattagagtcggaattgacttcgagaatgtctccccaaatatgttctgtcaattgcaacctcgtaattactctgtttttattaaggactaaatactgaaaaatatcaaattcctttttggtcaaattaatgggcgtttcatcataactcactttataatcctgaagctgcaataaaaaaccatgaatgcttaaattattcatagtaaaaccatgcatcctgcgaataaccgcaaacaatcgcgcactaagctctgtgagggcaaaaggtttggtcagataatcatcggcgcccagatgcaaaccatttatcctgtcatccagttctccacgggctgtaagtacaataacggccattttcgatttcgttttacgaactgttttcagtacttcaaatccatctccgtcaggcagaccaaggtccagcagcatagcatcataatcattactgtttacctcctccagagcatcactgcagttgtgaactattttacagatgtagcctgcattacacagaaaatcgtaaacttctgccgcaagttctttcgtatcttcaacaatcaaaatattcataattcgacttttaaatgcaactaaatttaagcaattataaaaagcattgttacgcattattaaaaaaattaacgaataaaaaaaagccagtaaatttctttaccggctctcttcaaccgcattctcataatcattacttctgttttgcctcgtatacaattcttcgtaagcaaaacgaaaacaatttttcctacttcattttggttgtttctgcttttggagcttcgcttttttgcgatttcatttttttatcggctttgtttttgtgatgtttagttgctttcacttcttttgcaggagctgtctgtgccggagctgtttgtgcgctaaccattacacttgttcctaaaactgccacgagtaacattactagatttttcataatttttaatttaaattgatttatcttttttatccttttatagtcttctttttttgcttttggagcttctgcttttggagctgccatttttggtgattttacttttttatccgctttgtgtttaggatgtttggtcgcttttacttctttgaccggagccggtttaacatctttagccggaaatgcatgtaccataacgcttgttcccaaaactgctactaataacatcaataaatttctcatgatttctacatttttatattaataccttttattttacagatcaaatttaccctcgtaatatgaagacaaaatgaagaaatcatgtcccattaaaattttaactttaatttataaaaaaagcgaccggaatatcctgtcgctttatcgcatgtatatttaatgctgtcttttttaaaagcccaatcctaaagtcatcgaagtaactgccggagaaaaatcaactgtttttgttgctgtaccagtagttaggttaatcttataaacagactgcacaccactaactgttaatactgcaaaggcttcattactgttacctcctatatcaaaaccattcattcctgtggctgtcactccaagactacctactaatactaaagttccgttgtttggaggattttgcagatataagctactagtaccggaatcgataacaaataactgtgtagtcgaagcttgtgcaaaattattcgtgtaagcagcagctgtaacggatggcgtccccggattaagactgagatctgtagcggcaacaacccctgtatccggatgcaatcggagattttgtcctgtattgcttactacacgtattctgtcaaccgtgggattaaaatcaaacccaaaattttgtccggataatgttggtgacaatccagcaccaacggcggtcacctgtccgtttgaagaattaatcgttaacaatctgctttgattggtcagggcataaagcgctccgtttgcaggcctgaaatctaaaccaaccacctgctcgcttgtattcatccccatcagagcaactgaatttgaagttcctgtaaccggattaaatcgatacaaaatgtttgtttcggatgtcgcgaaggcgataggttttgttttaaaggctacttcaacaatctgctgtgtaaaaaccccgacccaggttgcttctccattcgttaaattaatcgtatacaatcttgattggctatttttattgtttaccgctattcccaaattcgaatcgggctgtatatcaaaacctccaactcccgaaaaatcaacttttaaacttcctacttcctgaagagttccatcatttgggggattttgcaggtacaatttatccgtagcataatcaatatcgaaaagctgtgttgtcgtacttcctgaaagactattggtataggcaatcgctcctacctgagcattcgctaccccgttaatatttccgtcggttgcagctacagttccgagttcgggatgcaatctcagattttttccgttattagacaccagacgcaccctgtcaaccgtggggttaaaatctatagaagacgatgttccttcaattgccggagagaaagatgccgttcctaaaggtgtcgccaatcccgaactttcatttatggtatataatctgctggtagagcccaatccatacaattgacctgtagcaggtctgtagtcaatactaatgatattctcgcctgattgtaatcctgttatcgaataagaacgaacaggagtttttaaatctttggcattaaagtaaaaaactttgttatcattgcttaatgcggtgaagtctaccggaggggcagtactaggcattggttcaggttctggctgaggaattggagttctgtcgtcatcattagaacatgcacctaaaaatgacattaatcccatcaaaaaaagtgatcttggtgtaaataaattttctctcataacgcattgttttttatttacttacggcaaaaaaaatcttttggtttgcaatttttcaaagttttcagaaaatagttatcaaatcttctgttatttctgaaaaacaaataacaaagcattttcttccctaatattatagtgatattcgtaactttgaaaattgaattgataaattgtacttatgtcgtcacaaaaacgcctttttctacttgatgcttacgctttaatatttcgtggctattacgccttcataaaaaatccaagaattaactctaaaggaatggatacctcggcgatcatgggattcatgaattcgcttttggatgttatcaaacgtgaaaaaccggatcatctggctgtagcttttgataaaggcggaagtgccttgcgtaacgaaatattcccggaatacaaagccaatcgtgatgtaacaccggaagccataaaaattgcggttccttatatatgtgaattattaaaagccatgcacattccgattattgaagtgtcaggttttgaagctgacgatttaattggaacgattgccaaacaagctgagaaagaaaattataaagtttttatggtaactccggataaggattttgcccaattggtttctgagaatatctttatgtacaaacctgcccgtatggggaatgggattgagatttggggagttcctgaagttttagccaaattcgaaatcgaacgtccggaacaggtcatcgatttccttgggatgatgggtgacgctgccgataatattccgggacttccgggagttggtgaggtaactgccaagaagcttcttaaggaatttggaacaatggaaaacctattagcgaatacagacaagctgaaaggaaaaatgaaggagaatattgaggctaataaagagaaaggattgttatctaaaaaactggctaccattttattagactgcccggtaacttttgatgaaaacgattatgagttaacacgtcctgatattgaaaaaaccgaagctatctttcaggaattggaattcagacgaatggccgaacaatttgataatttgtttaaaacgggaggcgagaatgaaacaacttcagctccggtttctgatgctaaattgtataaaaaaccacagcctaaaaacgaagatcagtttgacctttttggaggaggctctaccgaagaaaatacagaagcaacccgaacttctttttacaatactttagaaaacacccctcactcctatcaggcaattcaaggggatctgggaataaaattacttttacagaaccttcaaaaccagacttctgtttgttttgataccgaaactaccggtttagatgctttgcacgccgaactggttggtattgcattctcttacgaaaaaggaaaagctttttatgttccttttccggaaagtcaggaagaagctcaggttttaattgaaaaattcagacctttctttgagaatgaaaacattgaaaaaataggtcagaatttaaaatacgatttaaaaatcctttctaattatggtgttaccgtgaaaggaaagctttttgacactatgattgcgcactacctgatcaatccggatatgcgtcataacatggacattttatcggaaacttacctgaaatatgctccaaaaccaattgaggaattgattggcaaaaaagggaaaaatcaaatttcaatgcgcgatgtagctcttgaagatatcaaggaatatgccgccgaagatgctgatatcactttacagcttaaagaaatcttcactacagaattagacaaaaccgaaacgaagaaattatttgacgaaattgagattccgctagtaagcgttttagcggccatggaaacggaaggaattcgtctggatgtggagtttttaaaggcgatgtcaaaagaaatggatgttgaaatcaaatctctagaacagaagatatacgaaactgccggagagaaattcaacctggcttctcccaaacagctgggcgacattttgtttgacaaacttaaaattggcggagcaaagcagaagaaaaccaaaaccggtcaatatgcaaccggcgaggaagttttaacttatttggccaacgacaatccaatcgtaaaagaaattctggattggcgtcaaatggtgaaattacagagcacttatattctggctttaccggaacaggtggacaaaaagacacaacgtgttcatacggattatatgcagactgttgccgcaacaggacgtttgagttctaacaatccgaatttacagaatatcccgattcgtaccgaaagagggcgtcagattcgtaaggcttttgttgcgcgcgatgaaaactatactttaatctctgccgattactcgcagatagaattaagaattattgccgctttaagtggtgaagaaaatatgattgccgcttttaaaaacggagaagacattcacagagcaaccgcagccaaagtttttgatgtgcctttagaggaagtttcgcgcgagcaaagaagtaatgccaaaacagttaactttggaattatctatggggtttctgctttcggactgagcaatcagacttcgttatcccgcagtgaaagcgccgctttgattgaagcttactacaaaacatacccgagactgaaatcttatatttctgaacaaattgaatttgcgcgtgaaaaaggatatgtgcagaccattttaggccgtcgccgttatttaaaagacatcaactcggcaaatgcggtggttagaagtgctgctgagcgaaatgctgtaaatgccccaattcagggaagcgctgccgatgtgatcaaaattgccatgatcaacattcataaaaaattgaaagacgaaaactggaaatctaaaatgctgcttcaggttcatgatgagcttgtattcgatgttcacaacgacgaactcgaaaaaatccagcctatgatcaaacacgaaatggaaaatgcctttactatggcagttcctttggaagttgaacttggaatgggtaaagactggctcgctgcacattaattttacatccgttttctgctaaattcttttgggcacactcaggactaaaaaacctgttatcatcagtggttttaatcccattatttctgaacacccccgtttttaggtattttcactaaaaaacgggggatttcatttttttgaagagtaatttgattttaaaatgctaaaatcttaggtttaaatcaatactaaaaaaaggaaaaaatccaatgttccgtgagaaatagttgaaatttgaaaaaagcaattctcaggaagtagtttgtttatttctgaatttgcctttttgaattttctgtgttgattcttcataacacatcggttggaattttccatttgttgaatgatattatgaaaagtcgtattcttgtgctggaaatagctttctacacaagaaaagccatcaaaaaaagctttttttgacccctttgctgatgttgagaatgatcttatccatgacttgatctgatgaaaaaagagtgccaaaagaaattttctattaatactaccctatggcaatggatgaatattaaagaaagtaatccttacaaaaccttaaaaaagtagttatctctttttaatcggcttttacccctttccacaaaaaccagactgatacctcatattgtaatttaccgaatatcggaggtttatgatatataaagcgattctaaaaccaaaatagataccaactcttccatatatttgtttctgaattttttaacatactcatttgcattatgtattatttccaaagcttctttaggattatttaaataaaaatctaacttttcatctaaatccgaataatcatctgcaatttctatataatgctcccctcctcgtaatttcccctccataaaccatgtttcaaattttagttttggagatacagcaatagaattgctactcattatccatttaagattagttgccacatcgtatccctccaaactcaaaatatatttataattcaggtgctctttatatgagagtctatctttaaaccattgggcattttccccattttttttcacatgccctatgtcaacatttggattattaaaatgttttttaaagaactcgattctgtgttgtttacgaatggataaccttccaataagtatatcatttttttgagcatacgctatatcatttttgatgaatttgaaatggcgctgtctgtctaaatttaagagtattcctttcccgttgtcattaccaataggccgacttttaactattgcatgttctttggggacgaaatctacatcaccaaacacgaaacgaattgggtaatttttatcaaaatatctagcgtattcaaatgtgtcaatataataagatgttggacttttaatatttcgcagatcatcaattgtatactcggaactaatatctcgaaaagaaaaattatctttattataatattgttttcgatcataacacatacttatctcttcatcactgagcttggaaagcaaatattcttttttagagagatactctttgtaatttgcaaaaatagaattataatacccccttaaatataaaaaaaacttgtactctttttcaactttcattattgtaaattttcactatgcaattcggtgtcctaccccattacctttaatcttattattttctcatcacacaacgctacgctaattttggatatccgaaacgtcattacgttcctcaactatccacagatagttctggcgttagcgttgttctgtattttatcagaaaaataaatatgaaaagaacaaagtcttaattatttctttcgaaaaaacatacttataccctttcacctatcaacactttttaccacattgcataaatgttatctgacagaatcagtaaattattttttttttgacctatataaactatagtgagtatatttggcacatcctattttttatgaatttattttataatgatttttttacaaaaactttaaatgatggattatttttagcttgtttgtaaaaaaatacttctttttttatggtttttatattttttctaaattcgttcgtactgttatttaatgtatttgtttcatttttggataagtacgatgagaattttacttctaaaatagagctcagtgtttcaattagagcgaattaaaacttaaatgtaccttttagtatttataaaaatctacggtattttgcaggaaaaattacggttatttgcatgaaaaatctgatcacttgcgttaggtgacctctaaaactaacgaagaaaattgttgttgttggtattgatttgggatggaatgaagtaaagaaagctttctcttttgattgaaaataaaaagattaatctcgctgtaaaaaagttttgaagctaaacttttagggggtatttttaggttttttctgttttatgaaattgtggtgagagcaagattaaccttatgctgtaataaatgcagaaattttagaatagtacaaagcagtgattaaatttctttaagattgtctttataagtacggccaattggcaactctctgccatctttgagctgtaccatgcgtgaattgaatgattttacgtggttttttaaaaccaaataagacttatgtattctgataaaacccaggtgacggtgcatttcctcaaactttgccatgcgttctaataccatatggtttttgtaacgggatacaattctaaggtattcgccaaatccttctatccaaaaaatatcatccagcttgactttgtttataatataatctgatttaaacataatatagtcctcagcaatatctttagactttataaaatggtggtattctttggctttggtaatggctttttcaaaacgttcaaagcttatgggttttataagataatctaccacatcaagttcaaatgctttggctgcatgttgttcttcagcggttatgaaaatgcagagtggcttgttgggtgtattttgcagtaactctatgccgttgatgccgggcatattaatgtcaaggataagcaagtcaacttcattttgctgtaaaaaaatgatggcttcctgtggattgctaaaggtagcgagcaggttaacaccagcagtattggcacagtagtttcttattagctccagcgcaaggtattcatcatctacgcctacagcctgcaattgtttcataatttaattttgagagtagaaaagtacgtcttatttaataattcgtcaaacaattgataattttctgcatatttcatggtgaggatttttttcagtgcaacgagccccattccgttatatccattatggttattaaactgaatcttgtccggcacagaattttctatcctgaatacgaaggtatcctcaaccttatcaaagttcaccttaatataggcttccttatctgctccaataccggaatgtttaagtgcattttcaaaaagtgtaaaatagatagaagggggaatctctacctgttcctgtacttcactatcatttagttcaaatagtatgttcagggtattattgtacttgagctggtacaaacctgcgagagccttcatcatttcgaactctttgtgtatcgcaatcgtttttttatcggtttcgtatataacatattgcaacagctggcttagttgtagtattgcttcggtggtattaccatgctggttgtaactgcctgcgtaaatgttgttaagggtgttgagtaaaaagtgggggtttatttttgacttcatgaggttgaggtcggtctcattttttttcacctcaaggtcgagatagtcatattcgattaagaacttatgccttgatattcctaaaaaagaagcaactaaaattacgatgctttgtgaactgtacacactgatcaaaaacaatggttggtcttgtactgcatcgccctcctgagaaaattcaggttcaacaagcagtcttagcagcgttgtagatataaataatatcagtgcatataacaggtattcaggatacttattggtttggtaataggcgggaactaaataggcataacaaacaaaatataataccgtattaatagccataataaaaagtattctatacaatgcaaaaggcatttcgataaaatagagcgtcgaaattaccagaaaggtggtgtatatcacaaagaacaggacgtgttgaaatcggataaggtttgtccattgttttttcatgagactgcctataatcttttgttcaaacagtaatctgaaagccacaaggaggataatgatgtttattagtaaaaccatacttttttgtgttaaaaattatttaccctttaaaattatatcattaaaaatacaaatatcattattttaaaacaggcactttgcgttgtttgtttattaaatgagtcgttcgttgaaaattacttttttgaaaaaatcaatcgtatacttttacctcagacaaataaattaacgatttatcaaaatgtatagaaaatatatatcaatcctgttttttttaatgattttttctacgaaagcagtagcgcaacaagataattttaacatgtggctgcaatatacaatgtccgcaaaattaagcgaaaagtacagctttacggcgctttctcaatatcgggcatacgatttagtaatggattcacgtctttttttagtttcgacctacctggaaagaaagttagatcacgatctttatccggctgtggggtatatgtttttggtacttcagccttataccagcgatacggataaaaagctgcgttatgaaaacaggccgtttcaacagttaacgatcaaaaataaaattggccgcaccacattattacaccgttatcgtgtcgaagaacgtttcttaaccaacccggatgattttgtggtgagattgcgttatctcctatcgttaaaaattccattgggtaaagaagaagggaagaatctattatatggtattctgaaaaatgaaatcaggatgaatgtagtaaagaaggaccaatttgacagtaacaggattactgccggattagggattaacttaggcaaacaatcagccatagaactttcatttgtcaatcaggtaagtcccgacgatacgagtaattatgtgttggcgggttttagaaactcatttgactggtcggccaaaacagaaaataattaaacttaaaatatacagttatgcttacaattttaggattctcaatgatcattgtatttatgtatctgatcatgaccaaacgtttgtttccgttaacagcgcttatacttatccctatactttttgccatttttggtggctttacagccgatcttggttctataatcatggaaggtgtaaaaaatattgctcccaccggcatcatgctcatttttggtatactgtttttcagtatcatgattgatgcaggattatttgatccgttggtaaacctgatattaaagtttgtaaaaggcgatccggttaaaatcgctttaggaactgcctttttaacggtattggtttcgcttgatggcgatggggccactacctatatgatcgttgtagcggcaatgttaccattgtataaaaaactgggtatgaatccgcttgtactctcgtgtattataatgcttggtggcggggtaatgaacatactgccttggggcggacctacggcacgtgcgatgactacccttaaaatggatgcatcagaactgtttatgcctatgataccggtcatggcaggtggtgtactatgggtaatatttgcagcattctggcttggtctccgcgaaaaaagaaggattgcccgtgaaggagatatgaacaagcatcttataaacgaggaagaaactgtaatagagcgcgagctcaaaagacctggtctgatatggtttaatctgctgcttaccatactgctgttggcttcaatgatgtttgatgtattgccgctggccgtttcctttatgattgcattttgtattgcactgatcatcaattatccaaaagttgatgaacagcaaaaagtactaaaattacatgcaggtaatgccctttcagtagcatcgatgatatttgcagcaggtatttttaccggcatactttccggtacgggaatgatggatgctatggcagcttcgatgatttcggtggtaccggatacctgggggaatgcttttcctgtgctaacagcggtaagcagtgcaccgttgaccttctttttgagtaacgatgcttactattttggtatactccctctgattaccgaaacgggcttacatttgggcgctacaaaattagaaataggagcggcatcgctcataggtcaaggagttcatttgttaagtccgctggtaccttctacttatcttttagtaggattggccggagttgagttttctgatcacgtaaaatttactataaaatgggctttgggttcatcactcgccatgctcatagcagcattgcttatcgggttaataactttttaaaactacctttgtagagcaacttaatgagtaaggtttaaaaagatgaataccacaccacaacatccggagagcagcggaataccacaaaagtatttgaaaaatttagcagcttatgttactatagcattgctgttaggaattgctgtaggacactattatcctgaaaagggtattcaattggattttttaggcagtggatttttatatcttattgaaccgctgatacaacccataatatttttaaccattattataggggtaagcagtattggcaatcttaaaaaagtgggtcgtgtagggcttaaggcgttcgtttattttgaaataataacgactattgccatgatcatggggataatggcagcgttgtttatagagcccggcaagatcgaaaaaagacttatagacgtaactctgcccaaacattttacagctaccgaatcactggatagcggctggtttaattttattgtgcttaaccgccccctggtattgctgctgttggctgttgtaacaggtgttttgcttagtctttcgccaggcagagcaaagtatgtagggatcttgcagaaaattatgacctttttgtatagggtactcctgtatttgtttttacttattccggttgcagcttttggcggaatggcttatgcagtatcgcgatttggtatacatagtcttttgcctttgggaaaactgctggctacgacttacatcacaatggcatcttttgtatttatagtattggggcttttgctgcgttattacaacatcagcctttggaagtttctgaactatattaaagaagaactgcttattgtttttagtacatcatcatccagaacagtgtttcctttgattgttgcaaagctggaacaggcggggtgtggtaaagctgtcgtaggtctttcaataccacttggttattcttttaaccttgcaggtgcatctatatttttgcctatatgtacgttgtttgttgctcagttgtttaacattccgcttacgtttcgcgatatcatcactatagggttggttatcatggtgacctcaaaagtagcatcgggaataccgggatctggttttgtagcactaaccataacgtttacaacacttaataaatttccgttagaaggcttggcactgcttttcagtattgataagtttatgaacgaagcccgaacgataactaattttataggcaatggggcggctgttatactcctttcgaaatatgaaaatgactttgaacccaatccagaaatagacctttccataacaaaataaacaagccattaaggcaccatactttaaaacaataccatatgactgatttgattactacttttaatagcctttggcaagatattattgcgcatccaggtacatcactggcaattattggaaaccttattctcattgagagtctactctctgtagataatgcagccgtactggctacgatggtaatggatttgccggaaaaccaacgtgagcgtgcgcttaaatacggtatttggggcgcttatatttttaggggtattgcaatggtatttgcttcggcacttattgctatttggtggcttaaacctattggcggactttatttgctctatctcgtatattcttggtacaaagacaagcagaaagaaggcagtgaagatgaaaaagtaaataaggaggggaactggttgtatcgtcttacagtgaatacgataggtcatttttgggctacagtttgccttgtggagcttatggatatggctttttcaatagataatgtatttgcagcggtagcctttacaccaaatatcatattggtatgtattggagtatttatagggatactggcgatgcgttttatagcacagaggtttgtgaatcttttagaaaaatataagtttttagaaactgcagcttttgtagtaattgccgttttaggaatcaagctggccttatctttatatgaacatttttatcctgaaacagcattcagtaaattcttaggcagccatgccgcagatattgggatctcggcgcttaccgttgccatattttttgtgcccatacttaccagtactttttttgattttccaaagaaaactaaatctgttgtgagataaaaattattattaatctaagaattaagataataagtgccatgaggtagtgttgtatcatgcttagcctcaactagacaagatagagatcatgactgctaaaccctactcctacaaaatgacctttcaatggtctgctagccgggaatagcacaaaccttgccttgaaatttaaaaagagatctatcaagtgtatcattacgccgcaaagggtaactttgcggctttgataatggctaaaattaaagagactgcataatcttcttcaattgcagacaaagttggaccaatagtacaccctcaggtccataattaggcaaaaactatctttattgaattatcacccaaaacctaagtattcaactaaaagcaaagtattttgattttataatttcataagtatttcatttcgaaataatcaaatgcagatttgtatataaccttaagtgaacaacccaatattgcgaatgtcacaatattaacaaattattaaatgacaaaattcaaaaattaacaattgaggtttatcatacatttgtaagggtcttctttaacagttgaaatttttattatgagttctaatttaattataaggttacgtgctggtgatgattcatgctttaaagaaatatatgatttataccattttaaagtattttgttttgttaaaaaatacacctcacaattagcagattcagaagatgtaacacaaaatgtttttattcatctttggaaatatcgtaccaaattagatccccaggtaagtcttgaagctattctgtttaagagctctaagcaggaaatctccagatggtataagaaacaaaaccgaatattttctgttgaagatgatgcgctgattcgggaattggatagtaaaacacagtctgaagaagaagtgagtttacagatggaaagaattgaatatctattggataaaattcctgctaaaagaagaaaaatattcagcctgcacaagtttgaagaccgcagttacaaggagatagccgaagaaatggagatgtctccgggggctgttgccaaccaaatttctaaaaccttacaatttcttaagaaaaactcggtccataatcatgaactctactggtttgctttattctttgtatatcagacagaattagtattgtagatacattcaaaatgtataaaacccgttgagtgtaattgataaaaaaaatacttaccctatagtgccgatgcatcgggatacacctataaaagaatattaaaaaacatatttcttacacatagtaaccttttgtgtatttacaataattgaaatgccttttctgaaagcgttaaatcgatgcttctatgtgtctaaaaataatttgcacccagtgggttatgaaaacctttttaaggtatttgcggattgattttgttctaaactcttgttgttaaatctttattcagattaagaaaacgttaatagtaatactgctccgtgatatttgccgaagtgagaatctaatgtagttgaattgatagctgtacgtaaatttcaaatattaaatgttaactcgaatgaaatccaaaagaatgaaagaagaatggaatgtgatccccaaccgtggtatacttcctgacaatattgaggcaagaatgtggaacaatatacgcagggttacgattgataaatataaaaaactttataactggatggctgtggcctgtgctgtatttgtaatttcaattggaagctatcaatttttgaacttacctaaaaaagcggatattgaaattacttcaacaattacatttaaaaacgatattcgacttataagtttgcctgacggaacaagagtatggctgaatgaaaactctcaactggaatacccggaacatttttcagataacgaaagaaatgtgagcttaaaaggagaagctttttttgaggtaaaacgggatccttcaagaccatttgtaattacttcaggagttataaaaacaaccgttttaggaacttcattcaacattaaagcctataatgaaaaacagcctgaggtaaatgtcagaaccgggaaagtaaaagttgaaggtgaaacgaataccgtattgttgctcagaggagataaagcagtttatactacggtatcttctaccgtaaaaaaagaaaagaccgacattctggaacctgaatggaaaaaagcattactgtatgttgacggattgactctggagcaggttttaagtaaattaaaagaagaaaatgattttaaggtaaattatttagaagaggatttaaaaaacctcaccattcagggtacgctcgacagcaggcaggggatttacgaaatgttgcagactgttgcatttgccttagaaataaaaatcaggtctgccggtaataatacctacttgatcagcaggtaaaaaaatatataccattttaatgcgattttttgcagcctataacttttgaaaaataaggtttataagcagccggggatttttatgcccaaacttaaaagatttaacacgtacatcatattcaaaaacaaattctaataaactaataattatcaattatgaacaatgatttttccaggcagttttcttttgtcttatggattttattttttggagtttttctcggaacaaatactatttatgcgcaaaccggaactgtatcagttgattttaaaaattcttcgcctcaaaaaattatcgagaatttaaaatcacgcacaccttaccaatttatctatcaaaaggatttagatcttagtctgcctcttataacactaaaaaaagacaacgtttctattgatgaaattttaagtgatttacaaaaaatgaccaatttaaattttagaagaaacgaaaataatatagctgtaaatagtaaggatgcggacaaaaaaaaaaagaaaggaaaaattacaggtaaagttgtagataccaatggactttcacttccgggagttaacataaaagtagtggagttaaattacggagtacagtctgatattgatggtaattatattttagaattagaacctggagaatatacgattgaaatcagcgctatctcctttcaaacacagaaaattacaggtgtaaaagtaacggaaggaggagaaacacctttggttgtttccttaaaagaagccgctcaatcactcaaagaagttgtaattgtgcaaaattacaaacaggcgacagcttcaattcagggattattgttacagcaaaaaaaagcagcacagttctccgatggtatctcagcagaacaaattgcaagaacaccggacagagatgtggcaagttcactaaaacggattacaggagtaacgaccattgataacaaatatgttgtagttcgttctatgggagaacgatggaatcaggccgttatggacggaattacacttcccagcaccgatgcctatcagcaaaacttttcttttgatattattccaacctcaatggtggaaagtattgtagtcagcaaatcagcaactccggacatgtacgccaactttgcgggtggttatgtagaaattaaaacaaaagatattcctaaagaaaactttaatagtttctcgataagtacttcatacaacagcagaagtacttttaaagaaagacttacgaagcaggaaggagattacgattacttaggttttgatgatgggagaagagattatccaacgaatttgacatccttaccaataccaacaaacgaagctgattccgggctttttatagagcagtctaagaggtttacagcagacaattttacgacttataaaacttatgctgctccgggaacaacacttcaatatgcaatgggaagagcgtataaattaaaagataataacaagtggggttttgtaggatcgctattttttaaaaatactcaggagaaactggatattgagcatacgcaaagagcaagtaatgccgataattcactttttgttccagagacggataaagcattgtattcaacatttaccaaatacggatttagaaattcaggagccaattatacatttaattctactttggcaggaatgtttaatgcgggaattcagtttggcaatcataaaataacggcacgtaatacagtgatgcacatttacaacaatcagcttactcaggtaacaggatggagtgacagtgatgccttatctgaaattatgaatggatcgatacttccttcgacttcagaaacagattatccggtttatcagaccttgctgcaaagcaaaatagaagggagtcataagtttggcaagctggatgtcaattggtttggagcttataacactgtttcaaaagatactaaagatgctacttttttggatacgtacagaaaaaaagtgggtgatgatactttgctttatcactatgtatataattcagaaacaagatttcctttcagcagaagtaactttacaaatgatgaaacagattacaatttcgccataaattttaagtactcttttgattttagcgatacctacaccaatgatataaaagcgggttattttgggacctataaaaaagctaccaaccagcaggaatcggcaaaggtagtcgtaatgggtacaggtgcagataaagcggagatttacgaacctctttcaaaatttttagacggttccagatactattatggaggttttggatggcaggattatggagtatacggtaacagatacgtaggtgatgtaaaagtacattccccctttttaatgctcgatgataaaattggacgttacgtaagattagtgtggggagtaagggcagaaagctatttgtataccgaaattgaaagccagtctgaagctgccggagattttggaaaagatcaaaaagacgataagttgtggcagtttttaccatcagcaagtttggtcgtaagtcctaccaataaaatgaatatcagattggggtataataaatcagttttacgtcctcaatttgcagaacgtttgagtattccttattacgatcctattcagtctgccaaaatttataattattcaggcggaatgatttccagtgtttccaataattatgatttgaagttagaatggtttccatccggaggtgaaattttatcttttggtgtatatcataaaaatatagatgatcctatggaagcagtgggaagtttgaatccatcaagaatcagaaacatttacaaccttaattcagccaatgctaaactttggggagtagaagtagagttgtataaaagtctttcttttttaggggaaggagaaacccttaaagatatttttatctccgggaatgcttctattaacagaactaaagtaacctcttatgtcgccattgacgggactggaggactgtatgaagcaaacagaccgctttatggacagtcgccctatacttataatttaggattagactacgtgggagatcgtttaggatttagtgtgagacataatgctataggagatcagtacatattagtaggatttgattatcagtctgaagaaatcaggatgccttattctatcacggatgcgcagattagttataagttttttaaagaaaaaaatctcgaattcaaatgcagtatgaaaaacttgtttgatgcagcaattaaaacctacgataattcaaacagttattcacatattgaaaatgtgccggtggggtcaaatccacgagaccgatacagcttaggagcaaacgccacaaataaatacgacgaagatattgacaaagtattatttaaagctaaaagcggcagaacgataagtgtttccttaagttattccttctaaatacaaaattcactaagaagctttattggaaggagtaaaggattacttcagacgaaataaacagtgggagagagacttttattggtctgagaaaaagagcggtttaagtcagaaagatcctggacattaagaaaccgttaacaataaaaaaagtggtgatattttgttcttgtgaagtctaatatagttgtaataagattaatttttttaattcttcattagtattaatcaaggtctattgttttttttttgcagttcctgtatggtcttttaaaaacttacagcgttataaaaagacctgcagtgattgcatcaaaagatcaggaagaatggaaagcaatcctttcattgcgttggaaaccctaagaatgaaagatggagtttaggtataaacctccgatggtaaagcggaaaaagtttatcaaaaagatctttgccaaaaacgagaaagacctaaggaaagatattttgctgctctctccaaaggcctagtttgaatagcagcaaatatagcaataattaaattattatgaaaaatttttttctatttgcaatggtagctctacttttgggctcttgccaaaatgatgattctactgcagattcttctttttcaatgaaagcttcaggtgctgattatgctcatccacctacagtacaaacagtaagcggtgctattacctctaatacaacatggacaaacgacagagtttgggaaatcgatggtgttattacagtaaaaaatggcgcaaaattaactattcaggcaggaacttttattaaagcaaaacctttggcaccaggagttgctacaggagttttggtaattactaaaacaggacaaattgatgcacagggaactgcagaatctccaattgtttttacaagttataacttattagatgacaatgctaatacttcagctcttccgggagattttggaggagttgttattttaggagatgcagaggttaatacaggttctgtaacgaacattgttgaaggattagacgatcagtctaattttactgaattttattatggaggttcaaacaacaatcacaatgcgggaatcttaagctatgtacgtatcgaatttgcaggacgtattttagatacagacgttgaaattaacggtttaacattggctggtgttggaaacggaactactgttaaccacattcaggtatcttatggtaaagatgattcatttgaattttttggaggtaaagtaaacgctactcatttagtttcttttgctgcggatgatgacaacttcgatttcgattttggttacacaggaagcatcacaaaagctatcgcacttgcagacagtaattcaactcacagtttaagcggaggaaatcctgattctaacggtattgaattagataacaacgctaccggaacacttactagcattatcacacgtccggttatttctcaattatctattattggtgtaagctcttctacagttgctgatttgtacgaaaatgccattcacgtacgcagagctggtaacatcagccttacagatgtaactgtaacagggtacaacacaggaattagatgggattcaccttcacttccatcaggatcttcttatttaagagtttcaatccacggatttgataatgttgctcttccggcaggaacaactttaacaggttttggtacaactacttctactgttgacccggctacaaaatggagcttaaaccagcctttctttaataatggcgctcttaattttacaggaacaacaggagcctttaaaacagaatctaactggacgaatacctggacaaagttttctaatttctaattagaaaaaaaacagcttactaattaaatactgtatgggcagagaaatctgcccatatttaaaataaaaaacatgaaaaaaacactacttttttttgcttttataatgattacaacgatatcatctgctcaatatacaatctgggaagatgattttgatgattctaatgtttcagactggaatttactggacagagatggaaatggaagtaactggatggccagaaaaaacattcagttggatgcaagtaccggaagtgtaattgacggaactattgatgttttgggaacctacaatattgattttaaaacaggcggacctcttgaaggattagaaaacaatctggccatcagtccggttttgaatatttctttttactccggaaaaattagtttgaccataaaagcgcagccaagtatttacgacagtaatcagaatattgcgatctatggttctacctctgcagatcccgcctcttttaaacttttgcataccattaccctggaaagaaatacggttgaagaggcagaatttaaaaattatacggtagatatttcgcagtttgccggcaaagccgaagtatatctggcattaggaaataatctttcaggcccgtttattggttacgaaatagataaaatttcagtaatggcagaagctttattaggcacagctgataatacattaaaatcatccttatgttatttaaaacaaaatcctgttcaggattatttggagttagaaatagcagaagagtataaaaatgaagaaacagttttaaaaatttacaatacgagcggcgttttaattaaagagtcttcttataagcctgaaggtttatctgttagtgatttaatgcagggcatttatttcctttctgcaaacaataatggagcttccaaaaaaataaaatttataaaaaagtaatctgattttcaaatcaaattatgcaaacaaaaaacaaacatgatgaatttattgccaaagttattcgtttctttaattttaattactcttgtaacatcttgttctactgatgaaaagctgcctttttacagcaatgaaaccaatcagccgggaagagtaaccattaacggttacagtgctttaaatgattcactacaggtaagggttaacgataaaattattgaaattagtaaagacaaaaaaacggcctttgtcaaaaaaatagaaaaagagtatgactttgtattttacggcagtcaggaaaagactatttctatactaaacaaaaccactaaggcagtattacatacttatcagtttaatgcacaaaaggttaaggatacgatttccttttttgcaaaagataacttttggattgataatgtttcgcgcataaaaccgggtgttttaagtaaaacggctaacagtggttataaatttattttccccaatcaaaacttgtattctaaaaatagttacacaggtaatcttgacggaattatacgcaaaatcaacgggcaggttttaggtacggttgaaaatataaataaagaaaagtttagttcttttattgaatttccatttagttcgcctccaaccattttaatggaactggtaaaacacggtacaacagaatcgtatatcccgggacaaaaagtaacagttattatgaccatgtctgttaataaatcaaaactaattgtactggaagaaaaactagatgcaaatggtaatttttccggtgtagaagggaccttaagcctaaccgattatttcatttttaaataataataaatcttcatttacgggaatataaaatcattattaacaattacaatcaatagatgaaatattcaactatttctgttttatcgttatttctttttttatctgtttttctattctcttgttcagataatgatgctccagctccggtttacgaagcaggtacaaatgagtatgttaatgagtggatgtaccagcagatgaagaagtattatcgctggaacaccacaatgccggaaaaaggccgtttagatctttctcccaaagagtactttgcagggttattgcaaaaagacgatcgatattcgtatgctgtgcatcctgaacagccggaaacggcacagcaaagtctcagacgcaaatttggattcgaagtttctttttttgaatttgaatcgaaattttatggcgtaattctgtatgtattagaagattctcctgccaaaagaaatggtttaaaaagaggtcagctgatcacaaaaatagaaggaacaatgctgaaccaaaataattatggggtattatatgctaaaatgaccgcatcaacacagttgaatttgcagaccatttcttatacagtacaagcaggattttctaatgtaaaggaaatttcgatactgcagggctatagcttttcgcagcccatcaattctattgttattgaaggtaaaagcaaaaaaattggttacgtcgaaatttctcattttgatgcaggacaggcgcagtcgtatcttcagacttttcaggaacttaaaaataaatcaattacagaacttgttgtagatctgcggtataatggaggaggggatatcgcagctgcaacagctttaagtataattctggctcctaatattcaatccaatactctttttataaaatttgaaggaaatacgaatggcggaaatgtagaccaatcctttaaacaggctttagaaagcaatgaatcaaaaataagttttgatgctcttcgcaatgttcatccgtccataaacagagtttatattttatgtggtcggcacactgcatccgccgcagagcttattataaataatctaaaaccttatatggaagtcataaccattggaaacaagacctttggtaaagatgtagccggttttccacttatagacgatagaatatcaactaaaaaaggctggactttgtatccggccatatataaaatgtttaattccaggaatgaaggtaattattcaaaaggaattgatccgcttatttctttagatgaaattcagcaaccggaagtttttcctttaggaaacagttctgaggttttactagccaaagctttaaattctattaacggaaatacggctaaaaatattttggcaacagcgaagacatctcctttatctgcaaatgaagcagacgctgatttcttaatgacaattcactaattcaaatacgattttacttcattatgcagggtatcgataaaagagaacatcggagaatggaagaggtttttaataaatataaaaacagttatagcaattctgtaatgaaactggaagaggataatatcaagatctgtcaaaatatggaagaactggatgtcttgtatagtagttttatgattctgctgacggaattgcaaagatgtgccagaaattatgagcagaaaaaaatagtgacccggagcatacttcataaaaacttaagaaagttgaattcagaagcttgccgaaacagataaagaaaaaaagtagtaattccaatagaaagtaaaagccatgagactttacacagcaggagtgtttgtgtacatgactcatggttttatctcaataaaaaaatgatatttctgctggttagcatagtaaaaaacgctactacgcttctaacagcgatgaaatagaatcaattagttgttttcgttggcagttactctgtttgcggcataattgaccggcgaataattaaattttattatgttgaattcatagttaaacttgtctaaatcattacactcacagtctattttgtcaaattgatctttggtcgttgtggtgacggtgacataggtaaatgtggttacggttgttcctgttagttcaacatagcctacaacacaagttaaaatgccaatcgtttctgctgtcgcccgttttgcatcttcttgtataattttcatatatcgcaatagatttgattccaggtattttagtttatcattcgaaatccctagtacatcttcaaagaattgtaaattcacggcagagggtgtaccgctatacgattttgtgctggagtatgccgatgtttcccccattccatttatagttatcatagcgttctgcatttcggtgccgtctaccagatacaatcctccaacaaaaggtgttgtatgacatgttttttttagggcggctcttatatcaacgaataatgcgagcgaattcttaaatgcttccaaaaggattgtttctgttttgttatcggtatcctttggcagcgatgccagcaataaattttcattacaggtgtgcagccacgctccatcaggggtgggcgtaatgcaatatggtatagatttgttcatgggtccgtgttttttgttgtgtataaaaggtctttattgcaattgaagaacttgttcgaaaactgttttttctattgcagaaaaaacaaatttggccattttatgcactcttctttgttgaatagatttagtattcctttcaaaggagtgcataaactgacacaaattaaatttcctttacgaaaagtatgaatttcgaaaaagttttgttgttgactaagtagggtctacataagaataaccaacttttgtatagtctacattataagaaaatttggttgaatcactagagcatttatgcttgatcagtacagcagcagaagaagcttttgaaactgcatatacaacagatgttgtaggtatattcagaccaggtactaaggatagaagagtgatagtggtaccaaagttctcagctgttgtgtcacccgcagccgcagcctgagttgccgccatcgatctattaagatagtcgcgcattgggtttactgaaccacccacgcctgataggatatcgttgaagagctgttcatttgcgtcctgtatagtaccattaccaattaatgctctttgtactacattagtttgtgacattcctcttatagaattcaaagctcttaccatggcatcttgatttagtgtataaagaccatccaccactgtttgccctgaagttgcttttacagcatcttttattttgtttggaacttgcaaggctcttaagaaggcatttcccattattcggttttgctcctcagtccatatgtctagtttataataaaagatgtaatcagttccttctgtgtgtatccatgtaccgtcattagtaacaccacgtgtttcacgtataacataatcatgttgctcgaattggttattatcaataatagtgctcattgtttttttgtttttggggttgtaatcattgctacaagaatttatcactacctgtaacaactaacctcagaccaccagactttctggcatttctaaggtatttgtcttactcataaggcttttcagtttccgcccctgtaataaaaacctctacaggaaggtttgtttaagtgggtaatgcagcattgttttttttctactagtaaacgaattaagaaagaccataaatccgtgttttttattttattttttagaatatcgtattctaattacgcttggtattgtaaaaattagcttactgatagttttttgttttgtaatattactcttcaaaattacttttttataaaattatgagatagcgtataaatacttgattttaaataaattagtatttttttgtttgtaaggccaatcaacagtttatactagaaataggtttaaacaaaaaagtcctgattttcatcgggacttttccttttgcggcaaaaatgatatctctttcaatgcactgttgtaatgtatacagaacttcttaaaatcaaaaaaacttactagagtgctttcattaaaatgaagcagagtgaattatggttggtttgtctcttatgaaggaaagtccgtaacttttatatgaaaaatccgtaatttttaggtaaatgttattgctattttggtgaaaaatctgtcatgttttgatttgaacatcatggatggtaaataataaggatttaaaaaggataacatagaagtatttagtcttgtaaagtccttagtgcttgttaaataagcattacaaaggaatactgattctgattaaaacacacgaatgtgaaatttatggatagaaacatggagtcaaataatatttatttagtttcaaaatattggaagaaaaaaatagtgaaccgagaaaaagttcttgggttgcaacagcaacaaaatagtcttccttgtattactattgaggccaaagaactcaattattttaatagacttaccaataaaaacgtaatagcccaatatacagttataagcgcgatctatacttttttgttaaagaaactgatgcatgaatttgatggttatctggtgtcaaactataatgatcagcatcattctttgcttctgtcatttcctgtagatttaaaaatttcatttaaagaataccttcaaaaaataaagcttgaaattttagagacattaaaacattcggattctaatgatgctcctatagctgaaaaaacaatcgttaatgatttaagtcttttatctcattatggtataaatttcaattcagacgctaagttagagtgtaacggtattttgtttcatgtaaaaatagaggatactatagaaattcacgcttcttatttagaaggttttgtaaagcaaaccatagtggaatatctggttcagcatttgaattattttattgttaatttagagcagaatgtagcgtttaatttatccgaatatccactactatccccaaaagaaaagcaccaattagtagtagattttaatgatactaatgtagcttatccaaaagataaaacgatcgtagatttatttgaagagcaagtagcaaaaacaccaaataatgttgctgttgtatttggagcaacagaattaacttatagcgcattaagcgaaaaggcaaatcagctggcccattatatttcttcaaaacatattgtaaataacggagatataattggagtgtttctgcctaaatcagatacaggaatcatttcgttattggccatagtaaagctaggcgcagtttatctgccaatagacaccaattatcctcaggaaagaatagattatttaataaaagacagtggtttaaaattgttaattgctaatgatgccactttaaatattgataattgtgatacagtagttatcgaatccatcgattttgatgccagtagcagcgacactatcaataaagcgatttcatccgaagatttagcttatgtaatttatacttcaggttctacagggcacccaaagggggtaatggtagagcatcggagtgtcataaatatggcattagatcaaatcagatcttttgaaatttccgaaagcgatacaatagcatggtttgcttcggtttcttttgatgcgtctgtatcggagattctgatgagtttgtatagcggtgcgacgctatctattccgacagaagaaataattaaagaccagaatcagtttataagctttttaaaagatacaaaagtatcagttgtaacttttcctccaagctatttaggattattgacagagaatgatatttctggactaagatgtatcattacagccggtgaatctgctaatccgggtaaagcaaaagcaattgtaaaatcaggaattgattattataacgcatacgggcccacagaatgtgcggtgtgcgtatcgatatatgaagtaaaaaatgattttgacaagtcgattattccaattggcaaaccgatctccaatactcaggtgtacatcttagacgaagccttacaactgctgccaataggagttacaggaaagctgtacgtatcaggagcgggtgttaccagagggtatttgaataaacctgaacttacagcagaaaaatttatatcgaacccttttatcgaaggatcccgaatgtatgatacgggagattttggctgttggctgcctgacggtactattgaatttttaggaagaaaagaccatcaggtcaaaattcgcggctacagaatcgaattgggggagatagagaataccattttagaatcttcagaaaatcttcaacaagtcgttgtagaagtaaaagaacaccagcaggagaaagtgttagtggcttatctggtagcaaaatcccatattgataaatcggaactgcgagcttttctgcaagagcgtcttccggattatatgattcccggtttctatgtagcactggatgctttacccttaactccaaatggcaaaatagaccgtaaatcactgccggctgttgagggagaagacttcatacgaaaaacatatgtcgcccccaaaaacgacattgaaaacaaactagccgttatatggcaggaggtactgggaattgacaccatcggaacaaccgacaacttttttgaactgggtggacatagtctgatcatttctcaggtaatcaatagaatccataaacaattaggcaaaaccgtatcctttaaaatattttttgtaaacccaaccattgaggggctaagcaaacaattgcaaataaatgaataccgagccatcaccaaagcagcggaagcagcatcctatccattgaccgcctcccagagcagattatggaccttgagccagttagaaggcggctccttagcctataatatgcccggtgtagtcaggttgacaggactggttaatgtcaatacattcgaagaatcgtttcgattcttaattcatcgtcatgaaattttaagaacttactttaaaacaaacgatgaaggagaagtccgtcaacatatactagctgcaacgcaagtaaactttagcatcacagagaaagattatagtttagttgaaaatcaggaagcagaaattgcggactatttgcaaaataaaaacaacgaacctttcgatttagagcaggcatcacttgtaagagcctccttaatcaaattaaaagagaatcagtatgtattttttctatccctgcatcatataattggggacggatggtcaatagaaatactactatcagaagtcataaaaacctataacgcactcacccaaggaaaagcaatcgacttgccggaactcagcctacactataaagactataccctgtggcttaatgaagaactgcatcaggagagacagcaggcatcagagcaatattggctgcaacagtttcagggagaactacccgttttggatatgccagcttttaaaacacgtccattagtgaagacctataacggacataatctcacgcagcactattcaaaagcatttttagagaagttaaaaacattctcaaaacaacaggatgtcaccttattcatgaccctaatggcagggatcaatgccctgttgcataaatacaccgctcagaatgacatcatcattggaaccccaatagcaggaagagaacatccagacttagagaaccaattgggattgtatctgaacacccttgcgatacgcactaaattaaaagaaaaaagcagcttcttagatttagtagccctgcaaaaagaaaccttgttaggtgcttacgatcatcaaaattatccttttgatgcactggtagggaaattgaatctaaagagagacaccagccgttcggctttatttgatgttctggtcgtattacaaaaccagggacagttaaacaatctcaataacgaagaactgataaacttcgaaataagcgattacgattttaaaagtaaaacagctcagcttgacatgagcttcaccttcgtggaaacagaaggattaaaccttagaattgactacaacaccgatatttatgaagaaagtctcattgaaagaatctttcttcattttgaaaacctgcttaccggatcaatagaacaaccccaaaaaaatatccgggaaatacattatttaagtgaaaaagaaaagcaccaactactagctgattttaacaacaccgcagtagcgtatccaaaagataaaacgatagtagatttattggaagaacaagcagccagaaccccaaatactattgcagctgtatttgaagaaaccgaattgacctatcaggaacttaatgagagcgccaatcaattagccaattatttaagagaaaactattcggttgaacccaacgatttagttggactcaaattggaaagaaacgagaaaatgattgtcgctatgttaggcatattgaaatccggagcagcctatgttccgatagacgtccattatcctgaagatcgaatagcgtatatcgaaaaagacagtaacagtaaggtcattatcgacggagcagcattggaaagattcagtgcagttcaggagcaatatggaaaagagaatctggaaaaaatccatacaactcaagacttagcctacgtcatttatacctcaggaaccacaggtaatcctaagggagtgatggtagaacacagcaatgcctttgaattaattaactggtctgacctggagtttgatgcgtcaaaatttgaagtgatgtacgccgtaacttcttattgttttgatttatcgatttatgaaattttctatcccttatcgatcgggaaaaaaataagagttctaaaaaatgccttagacatcaaaaactatatcactaaagagaacaaaatcttattaaacacagttccttccgtcgttagaaaattaatagaggagaacatcgatttaaataacgtatcctttatcaatatggcaggagaaatagtgccagttgatattgtttccaaacttcaggcagaaaaagcagaagttagaaacttatacggtccgtcagaagacaccacttacagtaccaattacgtcatacaaaatcaggaatacagatcaattccaattggcaaaccaatctccaatactcaggcatacatcttagacgaagccttacagctgctgccaataggagttacaggaaagctgtacgtatcaggagcgggtgttaccagagggtatttgaacaagcctgaacttacagcagaaaaatttatatcaaacccttttatcgaaggatcccgaatgtatgatacgggagattttggctgttggctgcctgacggtactattgaatttttaggaagaaaagaccatcaggtcaaaattcgcggctacaggatcgaactgggcgagatagagaatgccattttagactattctgaaaatcttcaacaagtagttgtggaagtaaaagagcaccagcaggagaaagtattagtggcttatctggttgcaaaatcccatattgataaatcggaactgcgagcttttctgcaagagcgtctgccagattatatgattccgggtttctatgtggcactggatgctttacccttaaccccaaatggcaaaatagaccgtaaatcgctgccggctgttgagggagacgacttcatacgaaaaacatatgtcgcccccaaaaatgacattgaaaacaaactagccgttatctggcaggaagtactgggaattgataccatcggaacaaccgacaacttctttgaactgggtggacatagtctgatcatttctcaggtagtcaacagaatccataaacaattaggtaaaaccgtatcctttaaaatattttttgccaacccaaccatcgaaggactaagcaaacaattgcaaataaatgaatacagtgccatcaccaaagcagcggaagcagcatcctatccattgaccgcctcccaaagcagattatggaccttgagccagttagaaggcggctccttagcctataatatgcccggtgtagtcaggttaacagggctggttaatgtcaatacatttgaagaatcgtttagacgattaattcatcgccatgaaattttaagaacttactttaaaacaaacgatgaaggagaagtccgtcaacatatactagctgcaacgcaagtaaactttaccattacagagaaagattatagtttagttgaaaatcaggaagcagtaattgcggactatttgcaaaacaaaaacaacgaacctttcgatttagaacaggcaccacttgtaagagcctccttaatcaaattaaaagagaatcagtatgtattttttctatccctgcatcatataattggagacggatggtcaatagagatactattatcagaagtcataaaaacctataacgcactcacccaaggaaaagcaatcgacttgccggaactcaggctacactataaagactatacgctgtggcttaatgaagaactgcatcaggagagacagcaggcatcagagcaatattggctgcaacagtttcagggagaattacccgttttggatttgccaagctttaaaacacgcccattagttaagacctataacggacataatctcacgcagcactattcaaaagcatttttagagaagttaaaaacattctcaaaacaacaggatgtcaccttattcatgaccctaatggcagggatcaataccctgttgcataaatacaccactcaggatgacatcatcattggaaccccaatagcaggaagagaacatccggacttagagaaccaattgggattgtatctgaacacccttgccatacgcactaaattaaaagaaaaaaacagcttcttagatttagtagccctgcaaaaagaaaccttgttaggcgcttacgatcatcaaaattacccttttgatgcgctggtagggaaattgaacctaaagagagacaccagccgttctgctttatttgatgtcctggtcgtattacaaaaccagacacagttaaacaatctcaataacgaagaactgataaacttcgaaataagcgattacgattttaagagtaaaacagctcagcttgacatgagcttcaccttcgtggaagcagaaggattaaaccttagaattgattacaacaccgatatttatgaagagagtctcatcgaaagaatctttcttcattttgaaaacctgcttaccgcatcaatagagcagccagaaaaaaatatccgggaaatacattatttaagcgaaaaagaaaagcaccagctactaactgattttaacaacaccgcagtagcgtatccgaaagataaaaccatagtggatttattggaagaacaagcagcaagaaccccaaataccattgctgtggtatttgaagaaactgaattgacctatcaggaacttaatgagagcgccaatcaattagccaattatttaagacaaaactattcgataaaaccgaacgatttagttggactcaaattggaaagaaacgagaaaatgatagtcgcgatgttaggcatattgaaatccggagcggcctatgtacccatagacacccattatcctgaagatcgaatagcctatatcgaaaaagacagtaacagtaaagtcattatcgacgaagccgcattggaaagattcagtgaaattcaggagcaatatgcaaaagagaatctggaaaaaaaccatacaactcaagacttagcctacgtcatttatacctcaggaaccacaggtaatcctaagggagtgatggtagaacacagcaatgcctttgaattgattaactggtctgacctggagtttgatgcgtcaaaatttgaagtgatgtacgccgtaacgtcctattgttttgatttgtctatttatgaaattttctatcccttatcgatcggaaaaaaaataagagttctaaaaaacgccttagacatcaaaaactatatcactaaagagaacaaaatcttattaaacacagttccttccgtcgttagaaaattaatagaagagaacacagatttaaacaacgtctcttttatcaatatggcaggagaaatagtgccagttgatattgtttccaaacttcaaaccgaaaaagcagaagttagaaacttatacggtccgtcagaagacaccacctacagtaccaattacgtcatacaaaatcaggaatacagatcaattccaattggcaaaccaatctccaatactcaggcatacatcttagacgaagccttacagctgctgccaataggagttacagggaggttgtatgtatcaggagcgggtgttaccagagggtatttgaataaaccagatcttacagcagaaaaatttatatcgaatccttttatcgaaggataccgaatgtatgatacgggagattttggctgttggctgcctgacggtaccattgaatttttaggaagaaaagaccatcaggtcaaaattcggggctacaggatcgaactgggtgagatagagaatgccattttagagtattctgaaaatcttcaacaagtcgttgtcgaagtaaaagagcaccagcaggagaaagtattagtggcttatctggtggcaaaatcccatattgataaatcggaactgcgagcttttctgcaagagcgtttgccggattatatgattccgggtttctatgtagcgctggaggctttacccttaaccccaaatggcaaaatagatcgtaaatcgctgccggctgtggagggagacgatttcatgcgaaaaacatatgtcgcccccaaaaatgacattgaaaacaaactagccgttatatggcaggaggtactgggaattgacaccatcggaacaaccgacaatttctttgaattgggcggacatagtctgaaagccataaaagtcattaataggataaaaacagaaataggttccggaatagaaatttcggacatctttaaataccctacaatctcctcacagggggggtgtctcgatttagccttcaaaaaggtgtattcaccaatcgtttcgattcctaaacaagatttttatgagatgtctgatatgcaaaagagactttggattatctcaagcctggaagaagaggccatttataacattcctttcgcctgcatcttatcaggatctctaaatgtagagaggtttaaggagtctgtaaaaagattaatccaaaggcatgaaagcttaaggaccaggtttgttttttttgaaggagagcctaaacagcagatcatagcgccggaaaacttagaggagaatctgatccattttattgacctgtcggaagaattcaacaaggaagagattgcagagactcttacccgccaggaattaacgctctcttttgatctgaaaaaggaccttcctttaagaataaacataatcaaactaagcgataaggaacacattctaaacatcacattgaaccatatggccgcagacggctggtctttaaaaatactttttgaggaactcatcaggtattatgacagtctggtaaaaggggaggatatttctttaccacccttgcgaattcattataaagactatgtatcatggaaaaaaaatgatgaggaacaactggtcaaagaccagaagagcaaagaattttggctgcagcagttgcagggagaactgcccgtatctaatcttccggcagactatccgcgcaagagtacggttaagaattatgcaggcggaaatgtttatgtagaactctctcaggaactgaccgcaagtatagaaaaactggtaatcacgaaaaactcaacacttttctctttcttactatcggtattaaacatagccatttttcgatatacaaggaatcaggacatcattgtaggcaccgttgtttcaggaagagacatgctcgaattggaagaacaaattgggctttatatcaacactatagccatccggaatatattcgatcaggatattgattttacggcactgtacgaacaggtacaccttaataatcttcaagtttttgaacatcagaactattctctcgatttactgatagacgaattgtccttcaaaaacgacgacttaaaaacagcttcaatgtttaatataatgttagcggtacagaactttgacatggtcaaaaatagagaaatagagggattagaaattatttcttatgaagggaagtattcggaaggaataagtaaatacgatctgactctcgatgcgatggtacaggacaaccataccatgctgataaacttcgaatttaattcaggtttattcaaacccgctaccattaaagcattttctaattcatttatacaaattatggaacaggtgctgcatagccccgatataaaaatctcagaaataaatttatccaatacaatcaagtcagaacctgaaaaagttagtaaaaaaataagttttaatttttaaagtaaaaagtatgtcgcaaacaaaacctattgtaagttcttacaatgaatgggacccgttagaagaagtaatcgttggaacaatggaaggtgcatcagtaccgccctggcatgttaccctgaaagcaacaatgcctgaaaaccactgggatttttataaaaaaaatggaggaaaattattccctgccgaacagataaaagctgcgcagctggaactggacaacctggctcatatattggaacaggagggagttatcgttagaagaccggatccggtagattttaacagaccttacagcactcccgattggaaaagcgaaggtgggttatatagcgcaatgccacgcgatgttttattggtgataggtgagaacatcattgaagctccgatgccttggagatcaagacatcatgaagtgaattctttcagaccactgataaaagaatattttaataagggagcaaaatggtcggcagctcctaagccgcaattgctggatgaactttatgattataattatcaggaaggaagcggcaatgatcctattaattatgttataaatgattttgagccggtatttgacgccgctgattttaccaaatgcggtaaagacatctttgtgcttaaaagccatgtaaccaatgatgcaggtattaagtggctccagcagcacattggggatgactataccattcataaaatagattgtaatgacaggcacccgatgcacattgacaccacttttgtaccattggcacccggaaaactgctaatccatcccgacaggatgaacaaaattcctgagatgttcaaaagttgggacattatgaaagccccagcaccggtgatgccggacagtcaggttttgtatatgagcagcaaatggcttaccatgaacacctttatgattgacagtgaaagaattctggtggagaaaaacgaaaaaccaaccatcgaagcactgaaaaaatttgggatgaaaccaataccgtgcagtttttacaatttcaacacttttggcggaggttttcactgtgcaacattggatatacgaagaacgggcgaacttaaatcctacttttaatgcaaaatgagcaaataattagtaccgaaaaggagaaatcttttgtccaatcctatcggcatcgggaatggaatgatattcctgatgagaagtggaacgattggaaatggcagttaagcaacaggctgaatagctttgaagaaatatcggaaattatcaatcttacgcctaccgaagctaacgctttaaatcagaactcgttgtttagagttgacattaccccttattttttgagtctggtagacaaagacgatttcaactgcccgataaggaggcaggttttgccgaccgagaaggaaatgtatgattttagcgggatgaacgaagattctttaagcgaagacgagtattcccccgtgaatggtatcgtacaccggtatccggatcgcgttttaatgctgatcacgacccagtgtgcatcttattgcaggtattgtacaagaagcaggttggtaggagacagttcaaaaaattacaactccattgattttgacaatcagattgaatacataagcaacaatccacaaatccgggacgtgctgctgtcggggggggatcctttactgctgcccattaaaagactggaatcgatcttaatgcgattaagagaaattcctcatgtcgaaattattagacttggtaccaggacaccagtattcaaccccaatattataactcaggagttttgcgatatggtagaaaaataccatcctttttggctgaacatccacgtgaatcatccgaaagaaattactccggaattacaacaggcctgtgacaagctgttgaaagccggcattcctttaggcaaccagaccgtattattaaaagggataaatgacactgtcgaaatacaacgtaagctttgtaccgaattagtgaagatgcgggtaagaccttattatctgtatcaatgtgatttagtaaaaggagcaggccattttcgaactcctatatccaaaggcatcgagattatggagggacttagggggcatatttccggatatgccattccaacttttgtaatcgatgcaccttacggaggcggtaaaattccgctggctccaaactatgttttaagtcagtccccaaataaagttgttttaagaaattatgaaggttttattaccgtgtacacagatgcggatcatgaaccggatcataaaattacttcgggcaacaggaaaggcaaagacatatccattatggatttgattcagggcaatgaaaaatttataatgccgcaaaattttagaaactcaaaaagagaagattaatggagaataccaatacaactttagacaccgttttaactcttacatctgcaaagttccttaaacaagaaaaatattggtctgaaagaatcgctcaaatagcagagaaaacacacttagtatttactaataataccacagtttctgatgattttgagaaagaggaatacgttttcagtatggatgagccaatcagcgaaaagattttttccctggcgaaaggaaatgatctgtctgtttatgtcatattggatgctgttctgaaaatcatgctttataactatctggatcaggatacaatcactacaatttcatcggttttagaagaaaatgccgatgaagaaacactcaacgattcggtttatatatccggagaaattgatgctgcaaattcttttaaagagtttgtaatgcaattgagtgagaccgttgagctgtcttatgagaatcaggattatccccggaatgttttagccgaaaaaatcagtgggaacagcaacgacctgtccaacgtgtggcatgtatttgagccaatccatggaagagctgaatcgaccggcgatgatgtcgtttttacatttgaaaaaaacggcaatgtgcttcagggtaaaatagaagccaacccggctgctgtacccggcatctatcttaagcagatggggattcatttcctgaatgtagcgagggtggtaataagcaaccccgaaattcttcttcaggatatcagcctattttctgatagtgaaataaaatattacgaagacggatggaatccacctgtgagtttagctgccctttcggctgatacgatccatgctgtttttgaaagtcaggcggatagtaaccccgataatttatttgcaatcgattcccaaagccagcttacttatagacaggtaaacgaaaggagcaatcggttggcacattatctattggaaaaaaacgaccttaaaaatgcggtaattggaatctatttagagagatcgaatgaccttattatctccatattggccatactaaaggcagggggtacattcttcatgatagatcctacacttcctgccgacaggattgaggtgatgcttgcagaagtgaaagttccgatcatcatttcaaaagctccctacagtaatgctgtagctcatgaaagcaggacaatagtagatctggatcatttgtccttagagcattatccggttacaaatagtaaagctacagccggtccaaaagatccggcatatcttatgttcacttccggttcaacaggtaacccgaaagcagtacttattttgcatgaatcttttgtttccagaatgagctggttaaccaatcagtacaacctcacagatcgcgatgtgaccattcagaaaacacctttgtcttttgatccttctatttgtgaaatgtttcgtggtgtagcttcaggagcaaaaatttattttttacccaatggcgaagaaaaaaatccagaagctattcttgaggcggtaagtacctataaagtaaccactatggattttgttccatccatgcttgctgtttttttggattatatcaatacgtttgaaaatcatattgaaaaactggccactttaagatggatatttacgggtgctgaagctctgtcgtccagagttgtcaattcttttaacgataccttgtttgctacaaatggcacaagattaataaacacgtggggcgcaacagaagtaacggttgatgtgacttattatgattgttctgtttttccgtatgagcttaaaaaagtttcagtaggaaaaccaattgaaaatgcccggttatacttactcaataagcataaaaagtttacaccaatgggaatgattggcgaactttatgtagccggtatttatgtgtcaaatggctattataatgctgaagaactgaatgcggaaaaatttgttaccattgaaaattttggtactacccgattttacaaaacgggcgatttcgcaagatggcaaccggacggaaatttagattttataggaagaaaagacaatcagttaaaagttagaggtatacgaatagaaagtgccgatattgagtaccaaattctaaaattgaatgccgtaagtcaggcttttgtaacggttattcaggatccaaaaacagaaaatgattatctggcttgttacatcgttcccaaaaacaatagcgaacccattaaggccgcaacgatcaaagaagagctgaagacaaaactgccggagtattacatgccggactattttttctttttggacagctttcctttaaccgcaaatgaaaaaatcgataccgcaaaacttccaaagattatcaatgcaaaagacagtctgacttcggaatatgaagctcccggtactgacttagaacgaagcattaccttgatttggcaggaactcctcaatttagaaaaggttggggttaatgatttgttttttgacattggcggacattctttaaatgcggtttcgctgatctcgcttttgcataaaaaattgagtattaaaattgagataaaagatatttttaaatactctaccatcagatcgcttgcctcgtttattgaggaaaataaactggattctgcctattatgaaattccaaagatttcgaaaaaaaaatattataaaacaaccagttctcaaaagcgtctttggtctttaagtaaatttgatgaggcttcagtagcctataatgtcccggtagccgcggaacttaaaggggaactaaatattgattacttaaaaaaagcttgtgccgctttaatagaaaggcatgaaatactgagaacagctttcgttcttttggatgacgaaatcgtgcagaacgtgttgccgttcagcccggaattttcagcgttggaatatctggattacagcaaagcaaacaatggggaggcaaaaatcaatagctatattgaagatttcattcagcataaatttgatttagaaaagggaccgctgatacagctaagtctcttgaaaaaagcggatgaagattatttactgctcatctgcatgcaccatattatatccgattcctggtctctcaaaataataatgaaagatatcttatcgtattataatgctttttctgcccagattccggtaaatcttgctcccctggaaattcagaacaaggattatgcagaatgggagaatagtaatatcgatttaaaagaaagagcatactggagtcagaaactcgagggagatcttttgaagattgacctgccttcgttcagcgagcgtccaaaaacgcagacttataatggaacgtatgtggtttacacgcttccgtcaaacagtacaaaaaacctgcaggcactaggtaaagagtacaatgcgacgcttttcatgaccgcaatgtctctttttaattatatattttataagtataccggaaacactgacattatactgggtactgttattgccaacagagaaaaattatcgttacaagatcaaatcggattctatattaataccttagtgataaggacacaatttgatcgggatggtaagttttcggaccttatcagtctgacaaaaaataatataattgaagcctttgagcataaagattatccttttgatgagctggtcaatgatataaatattaagagggatttaggccgctctccggtttttgatgttttgattgaaactcaaaattatgccaataccatttcttcggatgataatctgagtgcagaatcggttgaagtgaatgtgataaaagcagataataaaacagcgatttgtgatttgaacatcatgctggtggaacaagcgaacggagaaattattttcaatgccagatacaatactgacgtttatgagtctgagcatatcgagcgtttgttcactcattttaattatttgttagatcaggttggaattgattcggacaaaaaccttagcgattatgatttgctgattgaagaagacaaaaaacgcatcagccaattcaacaagacggataaatttgttcctcaaaaaacaattccgaactatataaaagagcattcgcaaaccaaccctgatttatgcgcgattttgtacaatggcgtgcaaaccagctatggtgaacttcataaggaaagtagtcagattgcaaatttcctgtcattaaataccgacaataaacttataggtgttttaatgaaacgctcccctgaaatcgtaaaaaccattacaggagtatggaaagcgggtatgacctacctgccttttgacccaacgtatccttaccagcgtatcaaaaagttaatcaacgacgccggtctggaaatgcttgtgatcgatacaaactttgtaaaagaagcattgttattgcagtgggattgtccgggtcttaaaagtatcttttgtgtcaacagtgaaaatatctttctggaagccgaatcaaaaaatgcttctatgaacagagatctttgggagtatgtagccgaacgttctactgatgatatcacggctggtggctggctcaacagttataccggtaaacctttcagccgggaagagatgaacgagtatcgtgaaaatgcccgattcaagataagccaggaaataaacacaaaatcgaaagtactggaaataggttgtagctcaggaattaccatgtttgccatcgctcctttggttagggaatatcacggggtagatttatcggcaaacgttttaaaaaacaacgaagcaacgattaaggaattagagcttgaaaatattcagcaacacaacctttttgcccatgaaattgaccaaattcagacgggtgatttcgacctgattgttatcaatagtgttatacagaattttcatggctataattatctcctggatgtattggaaaaatgttttgccttattgggcaatcatgggaaaattttcattggagatatcatggacaacgataagaaagaaagtctgataacttccctgcaagattataaagaggccaataacaatgaaagagttaaactggagtgggacgaagaattttttgtggaaagatatttctttgatgatttaaagtttaaatacaatttcatcagcgaggtactgcataccgataaaattggaagtattgaaaatgaattgtattcttttcgctatgataccctaatttctttagataaatctcaaacaaacaccgcgggaggtgttcaaaaaaggtatcagtacgacaagcgttcccttaaaaaagagaacgatacctattctgatttgtccaatttagacgaggctgcttatatcatttacacttccggttcaacgggcgaacccaaaggtgcaattttacatcatttggggatgatgaaccatatctatgccaaaattgacgacctcgaaataacagctgatagtgtagtggcacaaaatgcttcacaaggatttgatatttcaatatggcagttttttgccgctctggttcagggagggtcaattgtcatttatgatgatgatacgataacgaatcccgaaaacctgttgtatcatttaacttcagatcaggtaagcatacttgaagtcgtgccttcttatctctcactgttatacaattcggcagaaaacaatggttttaaggaactggagcatttaaaatatctgttagttacgggtgagacagtacatcatgccctgatcagcaaatggtttgatgcctttccgaatatcccgattgtcaatgcatacgggccaacagaaacctctgatgatattacacattatatcatgaaagaatgtcctcaggggccaaacatattgattggaaaaactttacagaatttcaggatctacatcatcgacgattcgtttcaacaggttccgataggagtaaggggagaaattgtagtttcgggtataggagtcggatatggatatctgaacaatcctcaaaaaacgagtgaggtatttttggatgatccttttcagtcttccaaagttccgatgtaccgaacaggagatatcggaagatacagaccggacggaaatattgaatttttcggacgaagagattttcaggtcaaaatcaatggcaggagaatagaattgggtgaaatagagaataaaatattgcagatcgcggaggtcaaagaagcggtagtcattttaaataaaaacaacgaccaaaactatcttgtagcctttctaatcataaacaatactgtaacaaatgaagatatagaggtggaaactgaaaaaatcaggagacgccttgcacaaagcgtgcctgagtatatggttccttcaaagctgtttattgtgcagagttttccggtgacttctaacgggaaaattgaccgcaaccagcttttagcaaagagcgattccaaaagtaattctgaaaaagcaatagtccttccttcaaccccctatgaagaaaagattctggaattttggatggatacattgggaagagatagcttaggaatcaatgataatttctttgagaatggtggacattctatttccgctatacagatcattacaaaagtcaagaaagaatttcaggttgatatcccgttaaaggatctttttgaatatccaattctcgaagattttgcaaaaaggattgactttcataaaaaagaaaggctaaatgtggtattgccaaatccagcgaaaaaaagcagaaagagcaggtataaaatatcaccagttcagtttgccgaatggtacctgcaaaaatttaatccgaacagtaccttttacaacatcggatttatacttgaattcaatggtgatctgaatattgatgcattgtaccaaacaatagtacatctttatgacaggcatgatatcttcagaatagcattagttgaagacgatggcagaccgtatcagcttctcagggaacatacggaacttaattttgctgactttctgatcgatatcagacaagagtcagagcaggaaaataaggtgcaggaaatcataaaaaaatacagcaacaccgttttcgatttatccaaaccaccaatctgtaccgttaaattgatcaggctggcggatgagaaatacatttttacgttagagacgcaccatattgtctgggatcagatatcaacgtttattttccataaggaattgactcagggctataacaatttaattgccacaggtgattttggtcttccggaattaaaggtaaactatgtcgattacaccgaatggattaacgctttgatcgattcgggacaattagagtctcaaaggcaatactggttagaaaaatacaaaacaataccggaaccacttgaactgcctacagattttccgaggccactggtacattcctttaatggagactttattttcaaatcggttgatttagatttcaaacaggaaataaccgatttctgtaatcaaaatggggtcacctatcaaatctttctaatttcggtattgaacttattattatacagattaaccaaccaggatgattttgtagtgggaacacctatatggaacagagacaaggaaaatctggaagatattatcggcctatttgcatcgggaataccgatacgctgtacggtagaggaaaactggtctttcaggaaattaatggagcattcaaagaaaagttcgctggatgcttatgaaaaccatttgtatcccttcaacaagattatcgaagaattaaatccgactacagatttttcaagacaaaaagtaatgtccgtattttttggcgtgcaaaatgatgacaccgaattgaccgaaagaaattttgatggcatcaccatcaatgacatcacaggtcagtatgatttaaaaataaaccatacctctgtttttgatttcacgcttcagattgatcactcacaacattatatgtggtattcattacgatacaatacagatttgtttaaagcatcaacagcgcaaaatttcctttcgcgatacgagcagttgatccgccagtgtatagcagatcccgagcagaatattggagattatgacatattgctgaacgaagaaaaaacgatcattagcaattttactgagaatacagatgtttttgctattgaagattacggtattcataacctgattgaagaaacggcggtaaaatatcctgagaatgttgcagtagttgacaacgaacagcagcttacttatgcccaaatcaatgcttttgccaataaaatttctcattatctgatcgaaaaaggcattaggaaaaaagacagggttggagtgctgatgcagcgatctacagagtttatagccacagtattaggaatacttaaagcaggtgcaatttatgtgccgctgggtaaagactatcctgtacagcgtatcgaagaaattatcaatcaggcagaaattgaagcaatagttaccactacagaatgtttgtctcagacctttatggaggcctctttttcgaaactgttcatcgatctgaacaccacagatctttccggattttctgaagatgctccaaaaataaaggtagaaaaccaggacctggcttatactatatttacttcaggatcaacaggaaagccaaagggtattaatatcaaacatgtagggataatcaatattattaaatctactacagaggcttttaatttcgatgaaaacgaagctgttttatttcacacacctgtagtcttcgatgcatcgattatggactttttatggccattagccacaggcgcaaaaatagtcgtgatgaaagatgatgatgaaaaaagtataaaagcctatgaaacctatatcgagaagcataagattacgcatgtgcagtcggtacctttgttattagaatctattgtggatggtcttgaaagaaacgaaattttaaatcttcaaagtctaaaaagaatagcggtagggggggctttattgcagacctcattaagaaaccgattttttaatgtgctggagtgtaaattgtataactgttatggaccaactgaaaccactgtagattctacccgatttgactgttctgaaagcactgttggtacagatcagtttgttcccgtaggcaagcccgtagccaataccaaaatatatgttttggataaaaagatgaaaatttgtccgcttggtgttccgggggaattgtatatatcatcaataggtgcagctgccgattacctgaacaatcccgaacaaactgaaaatgcgtttgttgataatccatttcaggatggatttagcagaaggctttacaaaacaggagataaggggatttatgacgaagccggtaatttaatcgtatacggacgactcgacaatcaggtaaaattgaatggcaacaggattgagattgatgaaatagaatcggttcttttaaatcataatgctatttttaatgttgccgtacttgtaaacaaacaagcagcttacgaacaattaattgcttttattgaacccgaaaaaggaatcaacagttttgtgactaaggatggcagagtgtacacatggattaccctgcaccaaaacgaaatgattagggaagacttccagggcctttccaaaacagtaccttttgagccattatttttagaatcttttaaagattttgaccagatactttacgactatccggatctgcaaataaggattaatgacgaaagcggtaaaacaatctgttgtgtaacagcggttcctgttgttctgtcagacgcgactgctgtttccaatgatagtagcattttactgcgtagggtagaggaaacagaatacaacgccatagccattctgaatatttcgactctttcgacattcaacactctggaagaggatgagattttaaagtgttatgcagaggtatgccgtcattttggatattctaatctgatcagcctcaaagcttctgctgaaagtaaagatgtttttttacaaacggattattcctatttgctgaacgaacaatcggccggtaattatttgaatgataatgcaatcagaatgcatttgtctgtgtatttgccgcaatacatgattccgcgaaaaattattgttttagataaaataccactaaatgataatggaaaagttgacaagaataaattaaacaaattgaagctcaatagcgatttcctgtcgcccgaaaccaaattgacggtaacagagcaaatcataaaaagcttctttacagaaattttagaaaaagaaatccaaattcattccagcttttttgaatatggaggacattctataaacatgattcaactgatttctaaaatcgaaaaagagttcggtataaaattcccaatagtagaagtattcaatcgccaatctatttacagcatagcggcctatgtagacaaaaatgcaaagaataaagaagccgggatctacctgcacaaactcagcagtggaagaacaaagaatatggtttgcataccttctattagtaccacggcattagatttcttagagttgtcaaaacacctcgatcattataacgtttatgcgcttgatttttcttttttagattcctataaagaaatgcataacagtttaaatgacatcgtagacagcgctatagcaatgataatgaacagcggaattgaaggcgaacttgacctgctggggtattcagccggaggcttatttgcttatgaactgctaaaaaaactggaagattataaagtggtcagtaagtttatcgtattggatatagtaccaccgcctcagaccgtcagaataaacaaaaaagcaactgcttatgaagacgctgacgttgacgcattcttagaattggatcagctgaataaatttactcccgatgaaaggaaagtaattgtagaccgaatatggaaatatgcggaagtcacttcgtttatatcaggaaacaaaatgatcaatattccaacctatgtctttctgagtgaaaattccagtatcgacaaacacagcatttggcaagccttaatcaaaagtaaaatcaatctgatcaggcttgaaggggggcattatgaaatactccaaaaagataaaatacaaaaaaacacccaaattataacaaatcaaatagagaaataaaaagatacaaaattatgagaaatattattttaggaataaattgtgtataccatgaatcagcggcatgcttgataattgataacaaagtagtggcggctattgaagaagaaagactctcaagagtcaaacatgcaaaagaatcaaaaattgacaatccggatgaactgccaattcttgcgataaacaaatgtctcgagatgggggggataagtttagaagatgtttctttaatagggttttcatttaaacctgaaagaagattagaaaacatcccttcagaagatcgtttcgtaccaaacaactggggttgtgaggatggcgaaaagttattctatgataaattaacacaaattcctcaaaaacttcaggaaatggggttcaaaggacagtttagctttatcgaacatgcgatagcgcattgtgcatcagcatactatccctctccgtttagtgatgcggccatactttctattgatggaatcggcgaatttgaatcgaccacccttgcctacggacatggtaaaaatattgatgtagtacaacaaattgcctatcctaattcaattgggtttttatgggagaaaatttctaaatttttaggcttttcagaatacgatgcgtgtaaagtaatgagcgtagcgtcgttcggaaatcctttaacattcgaagaggaattcagtaagataatttccatcaatgatcaaactatttttgaactggacaatgaggtactgtgcttcagagttgaagattattctaagttagaaaagttattcaacattaaaaaaagagaaacattagatgaattagaagaggtacacaaggatattgctgctgctctgcaaaagtggacaaccgatattattgtaaaagttaccgacaggctttttgaagaaacaaaatctgaaaatctttgtgttgcgggtggtgtagctttaaactgtgttgccaacaccatagcttttgaaaatagtaaattcaaaaacatttttatacagccggcagcaaatgatgcgggaacggcattgggagcggctttaaaactaaatatagaatcagaaggtaatttagaaggattggttttggacaatacgttcttagggccttcatttacaaccgaagaaatacacaatgaaatgtccaagagaaatctggtgtattcacatgtggaagacatagaagtgaaagctgcagaacttattaaagcaggtaatattattggatggtttcagggagcaatggaatttggaccccgggcgcttggaaacagaagccttttggcagatccgagaaatttccatatgattaaaaaactcaattcaatagtaaaacaccgggaagatcacagaccattttgcccaagtgttttgtcggaagaaacagaaaactggtttgacattaaaaaaagcacacctgtatccgagtacatgcttatggcttatccggctttaaccaataaaaaagaacttataccggcagtagtgcatgttgacgggacttcgagaatacaggcggttaatcagaaaaccaatccaaaatatcatgggttaatatcagaattctataaactaactggtatcccaatggttttaaacacttcttttaacgatagggaaccaattgtttgtactcctgaggatgcgataaaaacttttttgaaatccaatattgattatttggttatggggaattttattttaaacaaacaggataatctggaaaaagtgtaatctttttgatgctgagaataaaaattttgaaaaagattccacaactattgaatgtatctttgtagggctatgcgtctattgcagaagtagttaatcgtgttggtggaactcgggtactgctttaaaagaagcgatgagataagtgaaagcagtacagcgatactactattgataacgaattaatagtcaatagtggaaatccgtattcagaaaaaaaatcacagaagaagtactggcgttaaaccattatttttcgccagtgcttttaaaggaatgtttaaaaaagaactcctaataatcaaaaaattatacacaagatggattataaaaaatataccgaagcaaacaggattgcatggaatgaggtgaacccgatacatcaggattttaaaaagagatataaaagcaaattcactttagaggactttagtactttggatgagaaccttctggaagtattaaataaaataacattccaaaacaaatcgatacttcagctgtgttgtaacgacggtgaagaactgatctcattaaaaaaaatgaatgccggcaaatgtgtcggtatcgatatctctgacgaagcgatcgattcggcacgttttctaaacgaccaactgggtcttgactgtacattccatgtttatgatgtttatgaaatggacgagattatagaaagcgaaaaatttgatatcgtattaatgacagtaggtgccctggtctggctgcccgatttgaatcagatcatcaaaaaaatctcaaaagtattatctcctgaaggatttctggtgattcaggaacaacatccttttagctggcttatcgatgaggatatgaaactttcggaagaagaaaattattttagaaaagaaccattaaaagaggaaggtggcctggattatttaggaaaaacagaatatacaggaagcgcaaactatagttttaattatacgttctccgacctattcaatgccattgctgataatgggctgtcactttacaaattatttgaatatgctaatgatatatcaaatttaaaagaagacctggaacaaaaagaactttcctatccgttgtcttatatctgcattgcaaaaaaacacaaaacctaatcgatgaatacattattagacaaactgtacaaactaaaaaaacttattggaaatactcctttgtataatatatgcgcggagaagaatatttttataaaagtagaatactatcaacttggtggtagtataaaaatgcgatccgcatttaaagtaatagaagaagcaattcttgatggttcaatcaatgaagacacagttgtaatcgaatctacttcgggaaattttgggatagcgctcgctttgatctgcagaaaactggacctgaagtttataccggttatagatccgtgcatctctttatacaaaaagaaaaagctggaactactatgcagtcacattgttcagatcacacaaaaagacgagaccggtaattatttactgaacagaataaaatttatcaaaaactatcttgaagaaaataaaaactctttccagcccaaccaatataaaaacaagaattgttacctggcttataatgccatgatggaggagataaaagatcaaattgatcaaatagattatatttttatctctgtgagttcaggagctacagtcaccggattatcacagcatatcaagaagtattttccaggaataaagattatagcggtagatattgaaggctcgctgattttttctaccataaccaaagaacgcaaactaccgggcattggtgccagcaaaacatctgattttattgccctggcagacatacacgatcatgttattttaagtgaagaggaaatcataagcggctgccaaaagcttttccatgagtacggcatcctggctggtgcttccggaggagcagctttttatgccgccttacaaaatattgaaaattctgaaaacaaacagaattgcctggtcattatacccgattccggcgatgattacctggaattaatagattataaatgctttcaacaaacttcttatgaaatacattaatgaacaaaacatattggaaatagggaatgactggaatgaaattattcaggttattgaagatactgttctcctgttagaaaaaaaggattacgcacaacctataaaaccataccttagatataaagatttaaaaaacagaataatcgctatgccggcttatgtagggggcgactataatatttcgggcataaaatggatcgccagctttcctgacaatataaaaaataatctgccgagggccaattcagttattatcctgaataatgccgataccggtgtgcccatatcggtgataaatacgcccatggtctcggccatacgtacatcggcagttactggtgcgatcataaaaagctacagggaagcagtagaaattaaggagaaaataaattttggtattattggtttaggaccaatcgggagaatgcatctcgagatgatttttactttgcatgaagatatcattgacaaagtttatgtctacgatatcaatccaattgacgcagagtcgctgcctgaaaaatggaaacacaagatcgtagtcgtaaacgattgggaacaagcctatttaaactcaaaaatttttattacctgtacggcttcgtcaaaacgatacatcaatcttccacctccaaagggttcattgcaactcaatgtttcattaagagattatgaggccgatgtttatgattttattgactgcgtgattgttgataattgggacgaagtgtgccgcgaaaacaccgatattgaaatgatgcaccagacaaaaggactgcttgaagaagatgtccttataatcacggatgtcttatccggaaaattaagaaaaactataaaagcaaacgacaccataatgttctgtcctatggggatggcgatttttgatatcgggatagccaaatatttctatgaattatcacaagataagcgtatcggacaaacgttgtaatttttaggaaaacgtattgccaaaaccgaaagaagaagcaaaacgattatcgcagttatccatgctgatgcctttttaaataggccgatagaatcctaaaaactggattacagccatgcaattatggatgaaaaagtgactgataatgttatggaactactataaaaagaatattcatgaaactgacattgccccaacaagatatttacttcgaacaattattatttcctaatgagcctgtttacaatattggggctaaaatcgaaattaaaggtcaagtaaacatagaaatattcaaaagagcctatgttgcattgattgatcagcacgatgcctatagaagtgttattgtaaaaaaggaagaaaatgttggtattcaaatactagcagaccatcaatcggagttggggtttattgatttttcagactttgaaaatccaactgaggaagcaaatctctatatgcaaaaggaatttatgaaaccttttgatttagtaaaaggaagccttttgcatatttttactttagtgaaagttcaggacgatttttactatttattctcggtgtaccatcatattataaccgatggctggggaacttcattaatgtttcaaagattggttcagaactacaatgagatttctgaatttggcgcaattatttccgattatccatttagttacaaagactttgaagaagatgatttcgaatatcaaaattcagaatcattgaagcaagatttaaaatactggtctcaaaaattcaaaccattaccggagaatttattcgataagttagatgaccgtttgcaaataaacaaaagcagccgtaaagaactggttattacaagagcggtttacaaccaattaaatgaactagccacaagctctaaatgttctacttttgctttaattttaggaattttatatacctattttggcagaaaacacgaaaacaacgattttgctattggcttacccgttttaaacagaagtaaagctgcctataaaaaaacggtcgggctttttatgggaatttctcctctgagaatgtcattggattttgaagcgacttttcaggatttaataattgatatcaaaaatcagttaaaacatgattatcgccatcagcgattcccgttaggaaagttaattcaggaattgcagttgtacagccaaaaagagcgattgtttaatatcacactttcttacgaaaaacaaaattattccgctcattttaaaaacacacaaaccaaagtaattccattaagtcatcaatcagaaagagtagctctggctttatacataagagaatttgacgaatcagaagatgtgaaaattgattttgactataatttgaattattttgatgaggtaagcatcacacaagtggtcaatcattttgaaaagttggttcatgctgttttatataattcagataaaaagctaaaagagttaacctatttaaccaaagaagaaaagcaacaagtaatatttgattttaaccgtacaaaagttgggtatccaaaagataaaacgatactggatttatttcaggaacaagttaaaagagtacctgaaaaaattgcggtaaaaggggagacaaaatcatattcttatagcgaactggataaactatccagccagatagcagcgtacattatttcaaaattttgtccggaagataaagcgccaattgctgttttgttagggcgctctgctaatatgattgctgttttgttaggtattttaaaaacgggcagatcttatattccattagatcctgcttttccaaaagaccgtttaaactatattgtggcccatagtcaaaccagcatcattattaacgaaaataatgatgaaattgaggggatagaacaggtaaagaccatagcattagaacatattcttgatgaaattggggaactgcaagcaacagcctttcaaaacgtatccccacaagatgcagcctacattatctacacctcaggttcaacagggaatccaaaaggagttgaaattgggcatcggtcattgcttaatttcttaaccagtatgcagcagctacccggaataaatgaaaatgacattttattttcggtaacaacgtattcttttgatatttctatattagaatttttcgcacccttaatttcaggagcgactttatgtattgctgaccagaatttgttatctgattctaatttaatcattagaaaattagaagaactcaaacccacaatcatccaggccacaccaagtttttttcaaatgttattcaatgctaactggcagggcgataaacaattaaaagtattatgtggcggcgatttgttaagcgaatcattagcccaaaaactaatcagccatagttccgcagtatggaatatgtacggaccaaccgaaacgactatttggtctagtgtaaaaaaaatagagcgcccctcgcaagcctccactattggtaaacccatcaacaatacgcaattctatattttggatgcatttttagatccaaaaccgataggaattccgggagccctttatattgctggcgatggattggcactgggatattataaaaacaaggaattaaccaaagaaaaattcatccaaaatccttttgatgcgaatactttgtgctacgaaacgggagatgttggaaaatggaattacaatggagaaatagaatttttagggcgaaatgacaatcaggtaaaaattagaggttatcgaatagaattgggcgatatcgagtcgcaattaaatcaaatagctgcaattaaagatactgttgtcattgctaaaaaaggagcacaacaagaagcttttttaatagcttatgttttgaaaaatcaagagttcatcgatacaattgaaattacgaatcaattgaaaaagacacttccgtattatatgattccgaatgcaattattccactggaagaatttccgcttacgcccaatcaaaaagtagatagaaaatcgttgtcacaaagagagattcagtataatacaaacgaagatcattttaaagaacctgtttccgatttagaaataaaactatcacactattgggcaacagtattaaatacaaaagaagccataagtgtaacggataacttttttgcacttggaggtcattctttgaatgcggtaaaattgattggattaatttcccgaaacctttatgtagagattactttaaaaacgatttttgattttcctaccataaaagcactggctgtttatttacaagaattaaagccaacccaatcgaatgccatacctttagctgaaatcaaagatttatatcatttgactcctgctcaatataccatttggctggcttctcaacaaacaaagaattcgattgcttataatatgtctgccggctatactattgagggaattatagatacagctaaagtgaaccggtccatcaatcaaatcattgaaaagtatgaaattctaagaaccaactttatcgaaattgatggaattccgtatcaaaaaatcaatgctccggaaaaaaacaggtttgaaattgttgtacatcaattaaaaaatgattccatcgaagaagtgatcgatcgattatgtaatactgaatttgatttagaaaaagacatgttgataagagctcaattgctacccttagaaacgaatcaacatttactccttttttcgacacatcacattatgatggatggtttgtcactggaaatttttatcaaagaatttatccaaaactataatcaaagtactcaaaatcgaacacaagagaacagtctacaacttcaatttaaagattattcggagtggtttaataaaacaataaaagaaaatcaatctaaaaatgagttgttttggaaaaattatcttcaaaactatacacctaaaaattcatttgacagggattttagtattcagaataataaacaaaatggacgtaaattatcatttgagcttacagaagaagttacgcttcttttaaaacaatttgctgccgaaaagcaaatgactttctatacccttttagtggcttcactcaatgttttaatttataaactatccaggcattcggatatatgtattggtaccgtaaattcaggaagaaatagctatgagttaaacaatcaaatcggaatgtttgtgaaaactctggtgttaagaactcaaataaaagcagaacaaacttttacagatgtatgggagaaggttaatcataacctattggaaataaacaattatcaggatctgccatttgacaaaatagcgtcggatatttttgatctgatgttagtctatcaaaaccccgaatttaattttgaaaacagcattgaattagatgagttgaaattaacatcttatgcaatcgaaagcaaattcagtagaattcctatcgtgtttaacttgtttgaaagtaaacatcagttaaaaggaactatcgattacaattctgatttgtttgaggaagataccatacaaatgattgtatcagaatttggtaaaatgctaaatgatattgttgttaatcctttaattaagatggtagaaatagacaacaaattagagcaggaaatcaatacgacattagattttgattttaatttttaatgattttatttgttttttatcatagaatgcgcagcgcctgtgaggtagactttgtagagtgtaacaaaattgaaggcaactccagtcttatctagtatttgtgaataggataattttaattggttatattctacagatgtaatcgaaccatttcttatgtttgtagctcaatctctaagttttaagtatgagtaagagtattaaaattatttcatcagaagaatttccaaagcaatttatgtctgatgcttctctcgactttgatttcttaaaatctcccttacagatatatgatttaaatactacaaccgagtatatccagattccgaccccgctttttagacctgattataattttatggttcatgttaccagaggttatgccaaacagcaagtcgacaaggaagtgatatccataaatgaaaatgatgttttgtttgtaaaacagggacatattaccgcaatgaaagaaattgatcagatgataacgggacattttattttgtttgaggagcgtgtcctgaatcatattttatcgaaacaggagctaatacagatttttgccgccaattcggttcttaaattgcctaaagagaccagtatatggcttaattctttgtttggtttattaagccaggaatttcgcaatgaaaattccaatattgaaatttgttattcgctcatgcaggcggctttccagaaaattcttttttcaaataaagaacggaataaaacaatacatcgcaacaatgagatcactttttcttttaaagagctggtctataaacaccatacagagaataagtcagtaaccttttatgccgataaattaaaaatttctgtaaattatctcaatagatgcatcaagcaaaccaccggaatagctccgaaagagtggataaacaatgttagtattctacaaagccagatacttttgcaagatttgactaaagatatttcagaaattgcttttgccttgaattacgaagatccttcttattttggacgccttttcaaaaaaataacaggtacgactccttctcagtaccgaaattcattaaagcaagatttgtccgagtaacggcaaactaaatcctagtaacaattattgttttaactgcaactttgccctaagaaaatcttagagggctgatacagcttgtgtgtttaaatttaataaatgttattttgaaaaaagtactgtcattcgttttagtaaccttgtttttttgttttccaaataagttttatgctcaattaattacagatggtgccgggatgagcattactgtacacgggagaactaactttaagaatttgtcaactgtagatctgtactatgggaataaattcaaatacaatacttacgatttttggttgccaataccaccttttaaaattggaaaaacacgtattcttggaacggtcaactaccgtgttttagacttcacatttgaccgggatattgaaattagtccgaattacatcacgaagataaacgaaattaaacccaccattgttgtgcggcatcctataggaaaaagatgggccgcttttggagtcttgatacctacaattgcttctgactttaaaaattcgttttcgatgaatgatatggttttcgatggcatttttggagtttcgagaaagtttggagaaaagtccaatctggaaatcggaattggccctcatgttatgtatgcttttggcaagtttttaataacacctgccgtatctctggattataagagcaataatggtaagtggcttgctcaaatatactggccaagggtaaatgtttttagaaatctcggcagtagtacccaagttggtctggccggctcgattgactggacacttcacaatttacaaaactacaagaatgatcagggagaagagatcgattatgctcagttttcggccatccatggcggtttgcaaattaatcaacgtctttttgatggcttttggttacaactccagggaggtttaggatttgccaacaaatacacactttttaattctaataatgacaccattagcaattacaaagcaaaagaaacgccttatgtaaaaatgatgctcagttatcgttttgggaagtaggtacacaaacagaatcatattaaaaattataaaattaaagacaaaatgaaaaaatctattttaagcattcttctattgggagtatcttattttactaatgcacagcaggtaaaaacgaatgttgatgtacacaatgttcaaaaaggtaaaggagctgttgtactaaatgtatatgataaaaaagaaaattttctcaagcgagcctgctttaccaaagttcaaaaagtgaatcaggaaacgatgaagtttcaaattgatttgccaagagggacttacgcaattacggtttatcaggatttggataataatggaaaactaaacagtaactggctggggatgcctaaagagcctgtagggaacagtacgaattttataccggatggcggggcaccaacatttcaggattgttctgtttatatcttaaataatgacgctactattaaaataaatctttactaaggatttttgaaattttagtttaaaagagtctgtcttttatcaaatgactggcattaccaggcaaacttaaatcatgacataaaattatggaagagataaattctgaaaaaaaagttattgcagagttaaagggggcttgcaaggagtatcaaaccggtgatacattgattacggctctggaagcaacaactattcagtttagaacccgggagctcaccttaataattggtccttcgggttcagggaaaactacactattatcgctgttaggctgtgttatttatccaacaaaaggagatgtttttattgatggtcaacacgtaaatgcgctttcggctaaggaattatcggctttgagattgaataaaataggtttcgtatttcaaagttttaatcttttagcaccacttaattctttagaaaatgtaatgatgccgttgcagcttatgaaggtaagtgaacccgtggcaaagaaaaaagcagaaaaagctcttgaattagtggggatgaaagacagaatgaaaaatttacccaaaatgctaagtgggggccagcaacaaagagtttcgattgcacgggcattggtaaccaatccgccaattgtgctttgtgatgaaccaacggctgcattagatgtaaaaagtgttggtttagtaatggaggaactaaaagaacttgctcaaaatggaaaaagtgtaattgtggttacacatgatatgcggcttaagaagtttgcagacagaattatttatgtagatagtggaattgcgactgaaaatgagaataccacatttataaagaatcaattaatcaaattataaagaatgaaatatattttaatttctataacggctcttcttttttttagctgtgataaaaaagaagaagtaaaacagggacagaccggttttactaaagaagctctttcatcggatattgtaggaatcggacgcgttgaaccggaggagaaattgtctttattggcaacagaagtgggtggtgttgttctggctatccataaaaaggaaaatgatacaattgggaaaaatgatttaattatcgaattggatcattccgttcaggatgctaaaatcgcccggataaaaagtcgaattcaaacacaaagagttgaggttaacatagcacaattgaatttaaaagagcagaaaataaatgttgcaaacaaacaaattgaattagaacgactgagaaacttacaagaaaaaggcgcggaaacaaaacagaatgtggataatcttgaaacagaaactaaaatttttcaaacaaatctggaacaattgaaaagcaaggttttggttgaaaactccagacttcaggaaattaaacaagagctggaagtgtcaaacagggagatgcaacaatatttgataaaagcaccgggcgatggacaaattatgacaatgtacgcaacgaaaggagcggcattgtcacccaatcagtcttttgcagattttattccgaaaagtaatttggttgctacctgtgaaattgatgagctgtttgcagacaaagttaaaaaaggtcagaaagccattattcgtcaaataggttccaatacaactattggatctggtagggttattttcgcgtctttggcacttaaacgcaaatctattttttctgaaaaagcagaagatcaggaagacagaagagtacgggaaataaaaatcctgttgaacaacccaacgaaatatttaattaattcccggattgaatgtgttattcaagtatcgaaataagtaagcatcaaaaacaagcctgatagggaataagttcatagagaatggaaatgccaatatagaggaatgaatcccatctataaaggaaaacaaataataactaagtatgaaatttggtattaaaacagcgtggaagtttattcgtttcgataaaacaaaaagcattggagtagtggttggaatagtaataagtacttttctcattggacaacaaattgggacatttaattttttgacaggactaatgagtgtgctggtaaaaaacacaacagctgatatttgggttgttgataataaaacgacagatgccaatcagcttagtttgatagataccagaaaagaaaaggaaatcaagagtttggctggagtgaaagaggcatttccaatggttgtaacaaatggaaaggcaaaatttcctaacggaaccagtgctgttgtaaatattattgggagtgaatttccttattttaaagcaggtccggatagtgcaaaggttgtacaaggagaactttcagatttagtacaggaggcagctgtgtctgcagattattttgaccgaagtaattttggaggttcatcaaatgttggaaccagttttgaaatcaatgggaaaagagcagtaattactttacaaacaaaaggcataagaggttggggtggttatttaatgtacactacgattgacagagcaagattttacagtaatattccctctactgctatgagtgctttattggtaaaagtaaaaaaagggaaagatgtagatcaggttgtcgatcagatcaataattctatttatggagtaagagcatggcggacatcatctttgagttcagcaaccataaatagtgttttggcttctacaggtttaggtgccagtacaggatctttagtaggatttgccattattgccggtttttttattattggattaacgatgtattcatcagcacttgacagaattaaggattatggaacgctaaaagcaattggtgcaacggattcctatattaggaaattaatacttacacaagctgctttgtttgctattgttggatttgtgattgcttttattttcttattggggtttaagaacggaatgtatcaatcgggaatagtaatagattttagtcccggaatacttttcataattctgaccgttaccttctctatttcgcttttcggagctgtgtttgccattagaagaataaaaaatgtagaacctgcctctgtatttagaggttaaaaagttgttagaatgaaaaataatgtatggtatatctgtcttataagctgtcttctgttgtcaggattttttaaaatgaatgcacaaagtacggtctggaccttagataaagccattgaagcagcacaaaagaatagaaaaatagtagcttcactggaaaaagagtataaaatcaaccaattaagaacaaaagaattaaatgcaaaatatttgcccagagtagcgttgaattataattatcagtacaatccgattattgctacaagtgttttgccggctgaagcatttaattcccatcaagcctcagagggtatggttccggtaaaattaggagctaattattctcaaagcgcaggtgttttattgcagcaacctttagtggatatggctatttcaaaattaatagccgaatcgaaactacaggagaaactagctgctttaaatgaaaaagaggcaaagttggaacttacttatgaggtctcaaaagtatatttaaatatagtagttgcagaagagcaagaaaaagaagcggttggcgatactgcacgtacagcactgagtctggaaactattaatcaaaaatacaagtacaaaagagttttaaaaacagacgtaaacgatgctaaagtgacgcacaataatgcggttcaaaaataccgcaatgcggtgaataatgtattggttttgaaacagtatttcttatacgttatcggaagtgaatctttgattgcttctgctgtgaaattagaaaaatacagcctagaggaaggtattggtaatctggatgataatctaattgaagcattgccgcaaattgaaattttgaaaacgcaaaatgaagtattagagaataagaaaaagctggaaagaactaaatatagccccttgattactattaatggttacttaggagccgatcaatttacagaaaacctaaatccttttcagcaaaatagttggtatggaaatagttatgttggtgtctcactaaagttgcctttttcttttggagaaaatacagcaaaaagaattgatcagttaaaatttcagcaaaatcaaaatacggatagaattactgaggatattaataaaagtaaatacaatgctttaaatgccgttactgtttacgctaatgttttggaacaactaaaaacagtgagtgaaaacagtaaactaacttcagagattgtaatgatttaccaggaccgatataaatttgatcaaatatcctttaatgaactaaatgataaagagatcaaattgcaaaatctggagttgtttcagaatcagcttaaaaaacaattgatagtatcatggcttgattggaaaaaagcggcaggaaaattagtctggtaagtttgaagagcattaattcattatttttttaggatagtgttcattacaaattctttcatttcgattattattgaacggcatttaatacctttataggaaaagtagtttgaaattttgcataataatgcacgttaataaccaaggggcatgctaatgggatttagtataaaagagatagagacagttttgattttagtatttgttgtcattgcacttgtttttttatattattatcaaaataaaaagaggaaaagccacgtagaagagattatggatcaaattgagcagatgtccgatactgaatatgaagaatctgtgagacaggtacaagtccgacttcaaaaaactaaactaaaaaatgtagtaacaggagaggcttttgtttatttcgggaagggaaattttattagattgggcgatcatacaaaaaatgcaaaatatttgaaattttgcgaaaatgccgattatatggaggaattccgtacagaccttggatattcacttgaaggcagatataataaagatttttatatcatatatttcgatgaaaaaccctatgtgtcactgccgttattgcaaactttatatctttttgatgaatctaagtggcgaaaagtattgtacccaatagaatttatcgatggatttgggtatgattttttaggatttctgcagctttcattatcaaagagatatccggacaataggtggctggaagataacagttcggatttttgtaatagattttactttaaagatttgacagttgaagtaattttaagcgtgcccaccagttttgatgatgcctttatgtaataaaaagcctttaagcaataagtaagtgaaataaaattaatcttaattgctgtacgataaatttaggacgagacaattaaaaattatgagacaatatatagttgtttttttttgaaatgaagtttctactaatcatatattggagagaaaagtgttagatgttccataaatttcacttttttagaattcggttttgtacttacgcaccggaaaaatggaaaaaacttgtacgatataactagtaagtaagagtcgtaattttatgttttaagaggagtagaaaagtcggttggccggctgtatggtgttctgttttttgcgcatctattattttaaaaaattcagaacaatttggatatcagttggtaagaaaagttcagggcggttctaactcatctcttcgctaaacaccgattacttgatccttatgtgcgttgatttgagaggcaaacttcttaagtttttggctgaatccgcaacatgatttcctaatggtggcggacaaatttcgcagttctttttttaagttaatttttgttaattgtgttttttttttgtttatttggttaatgcataaatctaaaaaaaaacaataccacaatgcataaattaaaaataaaccaacaagaaatttattttgatcaattgctggattctgagagtcctcattataatataggaacctatattgtaatcaaaggcgacttaaacatagcattgtttaaggaagcagttagaagttccaaaaatgtatttgatgtttttaaatataagaatttttcgaatcatgccccatttgttaatttacaggaagaggatttaagtatccaaattacggaagtagatttttcaagcgaagtttggtcggaagaattagttaaaaaatggcttcaggaaaggatcaatacaccattcgatatttatgccggaagtttatacgattttgtattaataaaaatcagccatgataagtattggttctctataggttgtcatcatttattttcagatggatatggagtaccatacgtatttttgtcctatatctttgataagtatcatgctttaagaacaggagaaaaaaaagagttctgttacccatcctatcttgagcaagttgaaaagtctacggactatttggattcgaagagttatgagtctgataaagaatattggagacggaaatttacgcagtctcaggaatctattcttcaaaagagagtaaagactacttcatttaaaactgattcagttcaattctttttcagtacagaagagcagcagaaattaagaacattttgtgcaaatcaggaaattggtttgcaagattttttaatcgctgttttggcggtgtattataataaagtgtacagccaagagttttttgattttagtatacccattcacaatagaaccagtcatggggagcgaataactttggggctattttcaaaactcatcccttgtcgcttaaaattggaaaactgcagtcttaaagaattgtttgctgatattaagacaaaccaacgtcaggactatcgtcataaacaatttccggtgagtcattttaatactatgcttctctctgaaagtagtaatttatctaaaccgtttgatatcagtgtaaattatcggtattttaaactgaataccgatgaatcagaacttgatttaaaaggttttaaaaatgatgctacatattctaaaactccaatagaatttagtatttgtgactttgcggaaaaaggggaggaagatttgtttttagaaattatctttcgtgaagattattttaccaatgctgaagtacgagtattaggcgagagcttattgaaaattattgatcagttttatatttttggtagtgatgatatagacagtattcatgttttaggtgaggatgaaaaacacaaactgcttttcacttttaatgatacaacagtagcctatccgaaggataagacgattgtagatttaattgaagaacaggttgcaaagacaccggataacatcgccatagtctttgaggatacagaactgacttacagggagcttaatgaacgatccaatcagctggcgcattacctaatagaaaattacaacattcagccggatgatctgatagggacattcctccccaggttttgctcttgatcccttttctggctttcagccttttctccccaggttttgttcttgatccgtaaaataggtaaaaaaagtaaatcttatgaagtgctaaggtttgcaattgccctggttttattttggatttacattgtaactgaagagaaaacaatagggtatccgaactatttgtttaattcgcttttctggataatattggttgttattgttgtaagaaatttacagataaccatcaatgattttaaagatttacgagataagattgataaagcaatttttacttttttatatatattcaaaattttaattatttctttctttttaagtggaatcgttttaattccttttaatttgtataataggtattattcgaaaagaaatgcaatagaacttattaaatgtgaaataacaggattgtctgattattcgaaaaatagttgtttttattatagctataaaggcgaagtgtctattatttatgctcatcgaaaaataatgtccgatatttatattaataaaagttatcaggattatttattcgtggctaaagctagaaaaggattattagatacttatttaatagagagctgggacattgttcataagtaatctcctgccgacgggatgtagcgctcatgaacatgacttgaatgatgttcaataatgtcagataaggaaggaaattgtctccgaataacaatatacaaaatccgacaggtttttagaacctgtcggatttatttatgaataagtagagaaaatgtattggttcatttcggggtcaactaccaaaaagagattgtttatttttttttgcctttttttagaaattccgataattaatttaatttctctttacctgtcccaaaagtataagtatatccagcgtaaggaaaatatttaaacattctgacctgttctaaattaaaggtgccattacttaaacttgtttcaatgataaacggtggagattgtcctatgagattgttaactccaaagtacaatctggattggttgccggatttcgttttttttgtttttgaaacgccaacatctacattgtaatttctcggtaagcgatagttattaggctttgatatttcattgctttggttgggatctactaagtacgaatcttttttgtcattataggaaaaagaatctggtgccgagattaaaacgccggaactataattgaacaaggtggataggacccaggattgattaatattccaaataacagctccttttatttgatgggttatatcgtttggagaattaaaggtctgaccattatttattgtggggaatcgcaatgtcgatttgctcagggtatacgatgcctgtacatcaaactttttgaactgcttagaaaattcaagttccaagcctcttgaattgccaaaaccgattagaggggattgtgttttgtcttgatctgaaacatcataaaggggtggatacattaaaatattggatacttttttttcgtaaaactgtaatctgatatatcctttgtttaaagttttttcatagccggcctcatagataaaagccttttccggaggtaactgatctgtactcggcatgcgtaaatctgtgggtaaagcataggtgttctgggcaatttgatgataaaattgttccattatggcataggaggcaaagagactattagaagtgttgtatttataaaccaaactggtacggggctgaaaagaattataaaccttgtttttagttaaaaaagtggcataatgaagacccgcttttattcgaactttatcggacagcgttatatcgttgtcccaataggttttgaaatgtaatgactttatcaattgatcacgctcaacagtgttattagaaaaattagtcatatttattcgtaagcctatcgcgctatttaggaaggacgaccagtgataattcaggttgttttcgatacctatatctgtaatgcgaaactttctggttccatcctcatctgcattggcaaactgattattatagttgcttagcagtagaaccgaattctgaaacagtctggggttgtacaccctgttccagcgcaaagaaagtgttctgttggtccaggtaagttgaggtgcttcggaagaaaagaaatttacacgaataagatctccaccggtataggcgccaaggtacaaccggttggacgaattaataaaatagttaattttaaaataggcgtcatacatccggtatttaaaattaatatcctgatcaaaaatcgctttggtcaaagcatcaatccagcttcttcttgcgctgatcataaaggacatcttgtcttttatgataggtccttcaatcatcgcagaacccgttagcaaaccaatattagcagccccgtggtaggactgcatgtcgccatcttttgttttaacatctatgactgacgaaagtcttccttcgtaacgagccggaaagccgcctttgaaaaaacttatttgtttgatggcctgcgaatcgaaaatagataataaactcgtaaaatgattgtaattgtaaataggaacaccatctaataaaaccaaattctgatcgcttgagcctcctctgacatttaaagaagtgccgtaggtgcccggttttaaggtaagaagttttaacggatctgattgccccattagaaggggaagagcgttaatgtgctgcgtatcgattatgctggaaatctcatttaaaggttttttggatgacttaacctcaaccggagcaagggatagtcccatggtaagattgaagttttttttaatggttttgtttaccaatatcgtatctgtttgtgaagtaaaaccggtataactcgcatttatgatatacttgtttttgggtaatgttagcgtataatagccataatcattacaattaacagcaatgtttgtgtttaaaacccgtacagtagcgtagggtagcgcttctttactgccgcctgcataaacaaacccgctaatagtaaatggggcaggagcccgcaaaacggtgtaaataattattttatcatctctctccagaaattttactgattctgaagcaaaaagaagatttagcagtgtccctaattcataagttcctttgtcgatctttatctttttgccaagattgagtttattattgcttagggataaatttgcgccttgtgttataatggtggaaatataagctccgatactatcattctctatttggatagtgatcttttttttcagcaagcttgttttttgtgcttgtacagatccggcacaaaagaaaagtacagaacagcatgtaatgattaaccagtgatttatgaaagaattacttttcacaggatatgtttttcacccaaacagtattgcccttttgggtataactaagcccaaacaataaacggaattcttccaatatttcttttatggattcgttcttgaaatttgtagtgacggtgcaggaatcagagattttgccttccacctgtattttaatatgataacaattttcaatatcctcaaaggctttttgaagtggagtattttcgaaagaaagagactttgttttccaggagagtaagtttttgtcggctgtgtcacttttaattaatctgttggaggtataatgagctgcctgttttttctccaaaacgactgtttggttagtaggagtggcggtaaccttaacttttcctgtaatcactgctaccgatttctctttttctgttgttgttacaacaaaagaggttcctaaaacttttacggcgagtgtgcctgtatttacagaaaaaggcctactctcgtcgtgttttacttcaaagaaagcttccccatttaagctgacagtacggttgttccatagaaatcttctataagtaatacttgagttgtcattcagcgtaactaaagaaccatcactcaattcgatatttttcacctgtcggttagcggtttgaacggttatctcggcattcgcatacaagaaagcgaacgtgcttattaaaataaaaacggctgcaacggctgttgcatagatgtattttttgtgcaactgaaatacggttggtttcgtggaggataaatttggagctatacggttccaggcattagcggtttcaaataactgaggagaatctaatggctgactttctgcaaaaaaaatcttaagcgagaggtattcatcaggattgttttttatccaattcagtaatacagcttcttcctcaggtgtagtttctcctgaaaaatgctttgctaataatacattaatatcttggttgtccatggttatacctcttttaaataaaacacaaattcttttaaaacccccactatataataactaaaataccatattttaaagaaaagaattaagttgggatgctgtttgacaaattctcgtatatgtcggatggctttgcccatctgattttctactgtttttatggatatttctaatttctctgcaatttgtttatagcttaatttttcaatacgactcagtttgaaaatttcaagacattttggtgaaattccattaaatgcatcttctataagctggttcgcatctggtaagggtttcgtttcgggaatttcttcggcaatatcggtagacatttcgtcaatgtcaagcatatagattttttttctcaaaatggatatacaccggttcttaacagctatatacaggtaatatttgaggctcttttcagaaagtaaatccttgcgggtttcccatattttaatcatcagttcctgtactacatcttcgctttcgtccctgtcctgaagatacttataagcatgattgcataagggctgataaagctcgctgaacaattgtttaaaatgctttaggtcctcattcatatcataaaaaagtagtggtattttaaaattttactgcagcgtataggggtattttaatttttagcgtattagtaataaggcagtataagatattcttgccacaaatttaaatttattaactataaagtaattaaaacagatgaaaaagtcgattattgtatgcgcaatttttttaacattcggtacaactgtagtaaaagcacaagaaatcagtaagcatgaaataaatctaacctatagcgatggtataccggtgtcctttgcagatggtttttcaaatgcattatcttctgcaattttggggcaaaaattaaattctgagacgacctcttccggaaattttggtttgggatatcgatatcagatcactgaacgaataagagtaggtggtgatgtcgcttttcaacaggaacaaaccaaacaaagcgacaaaaattacaaacctattgctacgagaaccaatcgctattttatggcaatgccaacaatatcgtttagttacataaaaacagagtggttggatttttacggttccgctgctgcaggtgttattgtggacaactataccaatgcagaaacgggcaaagcagccgttaaagataatactactgattttgcttttcaggttaatcctgcaggccttcgcgtaggtaaaaaatttgggggatttgtggaagcaggatttggatatagaggaattattagtgccggtctcaattataaattttaaacagtagtttattagaaaaaagcaaatggcataagctgttcatagatggctaagtattaaaagtacttagccatttacttttacaaaaagatcagttgtctaaaaaaacaactacccgtgttttatttataggaatagatgtctttttattcaaggaaataacaaattgcttttttgtgtttttacatcacatcgctttttttaaaattatgcaatccttttattgcgatgaaaggagtttagatttgtaaaaacagaaatgggaattttatattagaagtggtattttgctgctacagatagatttctacccgatgcattgatgcccgatgcaaaaacgcggtactgtaggtctaaaatattttcaattccggcataaaccgataaattcttattgacattaaaggtcgttttgacattaatggtttgccatgccggcgtacctcctttaggagcatatttttggttgtcctcaccatttgaagaataatcactaatatctttcttgccattaaacaatgtatagaaatccagaagcattattttattttcatatttcaatcctgcttttccgtagattggagcgatatgatctaatggagtattccccgcacgatccattatttctcctttggtaaacgttaccataccataaattctcagtggttttgtgataaccattttcagggtggaagaaaaaccgcctacataagcatttcctttgttttgcatggcaaacacctcgctttgcactccttcgtaaaggacagaactttgcccattatacaaaaaatgatcggtaacaatggcatcaaaaaggcgggtataataaaccgtattgtcaaactgaattctctttccctgcccaaatgctacagtaaaatcggttgttactgatttttcaggagcaatattcggattgggtacaatcaaggttccaggcactgattcgaaaagttttcctaaatcatccacatttggaactctgtaacccgaagccaaattgaaaaccaatttagtactcttaatattctttgcaattccgacagtaccgctataagtgaagttatgctgctcgatcatgtcataaggaagtttgaaaaatgaattatcggcaatagtgctttttaaggaagagtaacctgtacgaatgcccaaattatagaaagtagtttcgtttatttttttattataagttgcaaaaacatctgctctaaaggtatgatttatgccgtttgggtaacgagtgtctgttggagacaccatgccggtgatgcggtttgaactgttagcagtcgaattgagattatcataaaaaaattcgattccgtaaagaaaatcacccttgtttagtttctttctgaaatctgcgttaaaagcaaatacatttactttttcgacctgacttttagttttgttatcgttaaattttctggagattctgctttcttcaatgttttgataactcactccaagattcatatcactttcgaacaaggccttttgtttcgaaaatttataagccgaaagaaatcttttttgtgggccataattccaaacagcatatttcagccccgaacctgatggatcggtaagacggtcatatcttggcacatctgaagaagacgaatattgtagatttaagctgtgctgcgtatattcatcttgttgaaaaaatatcttttgcatggcattgtattgcttatatccggaaaacttctgtataagcggattcttgttctgtaccaaatagtctacattgtttgaagtttcaacatattgaggacgctcgccaaaagattcattctttcctttaggattacttcccattctcaaatcgccgtaatcattatacgagaaagaggatagagagctccatcttttacctgcaaaattaagatcaaaatactgtgttgatcccttattagcactgttgtatcttaccattgcatttcctgaaaacactttgttatccgtttgggacagaaacatggggtttttggttctcatattgatggcaccacccaacgcatcgctcccaaaaatagttgatgaaggtccaaaaagaacatcaatctgttccaacgagttttcatcaaccgtaattatattctgtaaatgtccggctctgtaaataaggttgttcattctaattccatctatcagaagcaggatcttattggcttcaaaacctcttaatacgggacttcctcctccttgttgcgatttctgaacagctactgtaccagtgttggttagtaaatcggcagtgttttggtttttttgaaactctatctccttttgcgaaatgtgtttaatatcctgcgtcgacttggaataacgttctgtaatgatatgtatttcttttaatttttttggctctgtagtgtcggcaatttgttgtgagtaagctgtaataacaccaaagaatgctattaaaaagggggcttttttcatgtaataataaattagtttaaaattttctctcgaatagaaaagttgttgatattctattataaagcgttaggattacacaactcctaaaatctatgaatggtaattattgttttctgtgtaacataaaaggatagtaaaaaacattatttctttttcttatacatagaaggcttttctatgataattattttttcactatatattctttcatctaagtgaatgcgtacaatgtatgttcccgaaggtagtccctgaatgtttaccgctttctcaaacatagcattgtcgatactctcacttttttgttctctcacgagcctgccgtttacatccattatgctatagtaaaaactctttccggtacaatccataaatttgatattgaaatgtgtggtgcatggatttggatataagatgtatttaggtttaacaacaggaggattctcaattgccagattttcacaaatccccatcttagaccaagtggattgattttgatcaggtcgtttgtttttgttaattgccaaagccctgtagataatgttttgatagattacctgatctccaattaaataatctgttgaagtattccatgccatacttctgcaatttttgctcactatatttaaatttgcaaaggtgtattcggtaccgtttttgagaacggcggttgctgtgaaatagtggtctcccggactgatgttagttagaacagctaaataaggatatttgtttattgtagaaattatttccccattgtctttaatgataatgtatgataatacagcatcaggatcagtaacattgaaagtgaataaaaggtcctttccattatctgccgcctgattattttcagaagaagaaatcatactaataattgggttggtttttacaacaataattacaggagccgagctggtcacgtttccggtattgtctgtagcttttgctactatctgataagttcctgcaggcactttttcccaattgtatgtatagggactgcttgttgaagtcgatagtaaggttgttccgttatagaattctactttagaaattgttccgtcagaatcggctgctgcggcattgattgtaatacttgcaggagcaatgaatatagtagtatttacgggagctgtaatgcttactgtcggagcctgattattagcaacaactatgttgacgacagaagatgttgctgttgcatttctattatcatatgattttgctgttatctgataagttcccgctggtaccttttcccaattgtatctatacggactggttgttgaagtcgatagtaaggttgctccgttatagaattctactttagaaattgttccgtcagaatcggttgctacagcatcgattgtaatacttgcaggagtaatgaatgtagtattgttaaagggagcaataatatttactgtcggagcttgattattattaacgactaggtttaccacggctgatgttgctgttgcatttgtattgtcatatgattttactgttatggcataagctcctgcaggcacatttttccaattgtatgtatagggactggttgttgaagtcgataataaagttgtttcgttatagaattctactttagaaattgtaccatcagaatcggctgctacagcgtcgattgtaatacttgcaggggcagtaaatacagtattattagcgggagcagtaatggctgccgaaggtgattgattgactggtgtatttactgtaattgcaattgcagaagaaatggtaacatcgccgtcattatcgtaagctttggccgttaacgtgtacgttccggcagctacgtttttccaattgaaagtatacggacttgtattaactgttcctaatagtgtagtaccgttaaagaattctattttgtttatgcttccgtcggtatctttagctgtggcggatatgtcgaaagtggcaagagcaacataaatggcattgtcagccggagtggtaatgcgtactgtaggggggtggttcactctgactgaaactattgaagaggtagtaacagctccatgattatcgtaagctttggcagttaaggagtacgttccggtagttaagtttttgcaattgaaagtatacggacttgcattaacgattcctaacagtgtagagccattgtagaattctactttgtctatgcttccatcggtatcgttagctgtggctgatatatcgaaagtggctggagcagtataaatagtattgtcggtcggagtggtaatgtttactgttggtagttggttcactttgactgaaacttcggaagaagaggtagcaattccattattatcgtaagctttggcagttaaggtgtactttcctgcagctacagtgttccacttgaaagtatacggacttgcattaacggttcctaacagggtatttccattgtagaattcgactttgtctattttcccgtcggtatcgttagctgtggctgaaatatcgaaagaggctggagcattataaatggcattgtcggccggactggtaatgcttactgttggagcaatattattgatgacagtaaaattcacaggagcagaagaaataaccattccgctatagtcgtaagcctttgctatcagattgtaagttccgccacttactcctgcccagttataattgtacggactgttagtggatgtaccgattaaagagaccccgatataaaattccactttacttacagaaccatctacattggcagcaatattaatggtggccggagcaacataaatagcagcattagccggagcagtaatgcttatttttggtgcattgtctaagctgcaaaattcaatttccgctacatcacaataaccattggccggagataaatatctcacatatctgaaagcagtaccattggaaatcgcaacctcattccatgtcagaattggagtagagggaatggtgtacagatccactactccactactaaaatcagcgacattgctcccctggaattttcctcctctcattctgttttcataagatttccttggatagaaacgtattgttttaaccacttttgctgttccgaaatctaatccagtatatcctgaactggctgaactagcactaaaatttgtatttgtatctccgtcaaatgctttatcatattcataacctgctacccagggagaagtcccaaaagagctgcttgaaaaagaagaacaggcgaaagtaacggtagcggttataggtgaagagtcagtaatcccgccatgattatcatacgccttagcggtgagcgtgtaagttcctgtaggtgcatctgtccaactgtaacggtagggactggttgttgaaattcctaacaaagtgatgccgttataaaactcaactttactgatggtgccatcagagtcagaggctgttgcataaatgttaatgttcgcaggatttgtaaagaccgcataatcgtcaggtgaaataatggaaactgttgggttttgatttcctactgtgacggtaatatcagaggaaacggatgtagtatttgtattatcataagcttttgcataaagttgataagtaccggcgggaactcccgtccagttaaacgaataaggacttgatgtagcagtacccagcaaagtggcaccctgataaaattcgactttactaattgatccatctgtatcagaggtagctgccgtgagcgttatattcgcaggactagcagcataaagttcattattgagtggtgctgtaaggtttactgttggatgctcattaaaagcacagaactcaatctccgcaacatcacaataaccattggccggagataaatacctgtaatacctgtaggcagtgctgttgggtatactaacgtcctgccaggcataatttggctggattgggatggtgtacagatccacgaaaccagcggaagtagaggtattggaaccctgaaattttccacctttcatccttattgcttgtgacgttcttggataatatctaacattggtaaccacttttgctgttccaagatctaatccggtataacctgaactggctgatgaagcatcaaaaacggtatttatatctccgtcaaatgctttatcatatgtagaataggtgtaatagggagcagtgccaaagggagttcctgtgactttattgcaaacaaaagttaccataaccgttactaaggcagagcttttcttgtttcccagattatcataagctacagcagtcagatcatattttccggacaatactccattccacgaataagtatatggggaggacgtgcttgtacctagtaacgtagtttcattatagaattctactttactaatgtttcctgaacttacagaagcggttgcagtgagattgatagtagcgggactgctaaatgttgtattgtagactggcgaagtcatagctaccataatgttacttgggggagggaccaaatcactttgccacacccctcttccataataataaacattcaaagtgcctttagaaataccgtcattatagatatccatatctcttatattgcaaattataggaaggcctgaagagtaatttacccaggagggtttagtattgtccttataataaacgcccatagcataagaagcatatatagcttcattcgcactttgatgatcagcaaccacctttagcacgcttgctgcaggaaatccttttgtaattgtccatgttgttcctttatctgcagagcgataaatagtatttccaagccctaagtatagaatatctgaattaggtatgggagcgacggagcctttagttgatgtagcaggaagtgttgtctgaacaaatgcagcatcagtcctcgcattgtctgatctgtataatgcaggagaatctgtaaatgcatataaacgatctgcattaccaggatctacctggaggtcttttatgttaccggacggtacggtgtaaataagtgtccaggaaggagaagctgaagttagattagtgcaacgataaatttttccggcattagcatggtaagcaatatctgcattttcaggagtgaagacaaatttcccgcccgatggagtttctggcagattcaaacttgaaccagaacccgaaggataaggacgtctccctccgtctgattcagagtaaaaattaccggaataatcaaaccacatatacggaccatagtcaccacctctgtcattataaaagacaccattattgtagtaaaatccgccattatcctgtgttcctatgtattgtagatttctattcgctttgccaatggcaccatgataaatttcggtggctgctataccgtcagactttggagtccatgggcctgttccgttagctgtattgctccaaactccaccatcgttggcattccaaagctgaccgctaacataaggatcaaataaaatgtgatgctggtcggtatgaagatcgtatgcccaggatggttgttgcttcacccatgtaacgcccgcatctgtagaacgccatatcgcatgagcacatacataaagctcatttgaattagcaggattgacttcaatatcaaaattataatctccctggccacccgcggatgccgaatatccggcaagatactctgtagttgaacgcatgctcgtaaaggtatttcccccatctgttgatctgtaaatttctactatagtattagcgccaatattagcaacataaacaatattcggatcgacttgagaaacggatactcttgttccgctagctccgaatacaaaggctggagaagtgatttcggtccagctgtctccggcatcaagagaacgatagagatgtttaggatccgttgcataaattatctgaccatttgtgcctggtttgaaacagatatcctcaacttcaatattaggaacagattttaaggtccaattggcacctgcgtctgtcgatttatagatgccgttattggtagctgcaatgatcgtattgttatccgtaggaagaaaaagcatgtgtataaccaatcgattacccatgccggtatttgataccgcccaggtggctcctccattgatcgttttatacacgcctaaaccattataggaataatttgcatcacctgtcccccaatacatcacctgatcgttggtaggatctacggcgatggaagcagattgtgctttaacaacctgatcggttcctattgatttccagttaagacctttgtcattactctgatacaatcctcctgaagcactgacagcatacattttgttaggatctgtggcgtgaaatttaatctgactacaacgtccaataccgtgtacctgaccaatggttttctgtggaaagggtataggtccaatatttttccaattaggagtgggagtttgagcattggtaaggttaaagaaaagaaagcatacaagtaatactggaataggtagatttgttcgcatagattatttttaagattatcggggatttattgcttcgtttcttgtctcctttgcaattcttgtcgggccatttcctgaatttcatcctcagacattattcttccgtcagatttaaccaaaccttcactttggattctccaaaatttaaatctcttaaaatcttcagcatactgaagcgattctttttttagtgctttgttgcttttaaagagtctggaaatgaaggatctttcttttaattcttccagtgcttcttcttctccttccatcaattctaacggattgggtttccctttccagaattcctcaaaagcaacactagtttcattgaagttcgcattagggttcttcatcatttctttccattttggacttttacgaaattctttccgtttttcctttccaatttgtgattgtgcaatcgacagttgcagaaagaacaacaatggaagcagtataatggtagttttcctcattttataatagaattaaggttaattgtttgtttttaaaagagatatgcaggtaaaaatgtaaatgaacttttttttcttttttctttgtgtatgaatcttttcaaataaaagaaagctcgctataaaaagacataagttcagttgtcggacttgagttacttttctttaaatcaggtgtttttgttttctgacaacaactgatttgttccctgatttagaaatcaaagaaaacttggtttaaaacttactttgattagaagtagactccattttttgtttgatattaggacaaaagtatagctatagtcttgcttttaacaggctattgtaacaactgtaatttgtgtgtaatgattggttatttgtgattaatatctggtttttttgaacgcaagacagttgggagtgttttagatggggtggttttgcgaaataacaatctaatgagctaacagatagaaatatacgtaaatagcagtgtacggttaatagtttaaggtttattcttacggtaaaatggggagattatttttgttttgctttttttgttttaaaccttgtgtttttgtaaaaatcttatacatttgtcgcacaatttgctgtaagcccccttctttatgagaattgtagtagataaaaatatgcttaacaacctaccttgctgtttttcagcgtgttaaaattatgaagacaataaagaccgtttttttcacagtttgcctgactttactatctgggtttagtgctttggcacaagtgacaccaccagcaccaggccccgtagtaccaccagatgatccatatgatccggacatagtgcccatagataatcatttagtgtttttggcaatagtggcagttgttctaggaattgcaattatatatcgaaataaaattaaaaaagcttcagtgtaaactgaagcttttttaatgagtcgattttacgaattatttgtttatcgcataaagtcttgagatgtattttccaacaacatcaaattcaaggtttattttagttccaactttgaagtttttgaaattagtattttcaaaagtgtaaggaataatcgaaacgctaaattcgtttgtttttgagtttacaaccgtcaggcttactccgtttaccgtaatagaacctttttcaatggtaatattgctgaggtttttgtcgtattcaaaagtataattccagcttccgtgtgcttcttcgattttaatacaggttccggtttggtctacatgcccctgtacgatgtgtccgtcaagacggtcgccaagtttcattcctctttccagatttacaatatcgccttccttccagtcgccaatattggtttttaaaatggtctcgtcgatagcggttactgtgtaaagtgaatcttttattgctacaaccgtcaggcagattccgttatgagaaacactttggtctatttttaattcattagtgattgtggagtcaactgtgatctgaagattgttttgatcttttcttatttcgtgaatccttcctagggtttctataattcctgtgaacattttggttttattttactaaatttgcacatcaaaattagtaataaataatctgagctcatgaataaaaaagcagaaaatataattgttgggatttcagttggagatttaaacggtattggaagcgaagttatattaaaaacattcgaagattctcgtatgttggagatgtgtacgccagttatttttgcaaacgccaaaatactttcttttgttaaaaagagctttacctctacagttcagtttcacggtgtagataaattagagcaggttttgcctggaaaagtcaatgtttttaatctttggaaagaaggggtcgatatcaacttcggtaaaaatgatgagaaaattggtgaatacgcaattaaatcatttgttgcggctaccaaagcgctaaaagaaggtttggtagatgttctggtaacggcgccaataaacaaatacaacattcaatcggaagattttaaatttccgggacatactgattatctggacaaagaattagaggggaacgctttaatgatgatggttcaggataatttgcgagtaggtttgcttaccgatcatgtaccgttgaatgaggtttcttcccatttgacagaagagctaatcattagaaagattgaaacgatcagaaaatcactggttcaggattttagtattgttaagccaaaaattgccgttttaggattgaatccgcatagtggtgatggaggtgtgattgggaaagaagaagatttaattttgaagccagctttgaaaaagatctttgaaaaagggactatggtttttggaccattttcggcagatggtttttttggaagtggtcagtatgaaaaatatgatgctattgtagctacttatcacgatcagggattgattccgtttaaaaccttgtcgtttggtaaaggagtgaattatacggctggtttgaataaggttagaacctcaccggatcatggtacggcttatgatattgccggaaaagacatggcagattttaactcatttaaggaggcggtttatcttgcaatagatatttttcgctcgcgtaatcagtatgaggagattactgaaaaaccactcaaaataaaagaaaaacagttataaacaaaaaaaggtgaataagattattagttttataataattttatatctttgcaccccaattcaggcatctgagttttagatacggattggacaaattgatgttgaaatgagcaaaacaaaagaatttttaattcctttcgtaggattaaaactaggaaaacaccattttgagtatcaaataagtaacacgttctttgcgaactttgattacgacgaatttcaaagttcggatatcaaagtaggtttagttttagataagaaaagcaacatgttagagttggaattcaaacacaaaggaactgtaaatgtaccttgtgatctgacaagcgaagattttgatttgcctttaaaaggtaaaatgaaattaattgttcgttttggagaagaattcaataacgataatgaagagcttttaatcttaccgcatggagaacatgaaattgatgtagcacagtacatttatgaaatgattgcactgtcggtacctctaaaacgagttcatccaggagtgaaagacggcagtttgcaaactgatgctttaaaaaaactgaatgagctaacggttaaagaagagaaaaaagagagtaaacaagaagaagatattgacccgcgttgggacaaattaaagaaactattaacggataaataatatagtaaaatggcacatcctaagagaaaaatctcgaaaacaagaagagataagagaagaacacattataaagctactgtagctcaaatcgctacatgtcctattactggagaagcacatttataccacagagcttactggcatgaaggtaaaatgtactacagagggcaagttgttatcgataaatctgtagcggttgcttaatacgtttttgtaaatgatactggaactctcacatagtgagagttttttttgttggttatacttttctttttttaagaaaataactgcaaattaatttcgtttttttttgtaattttcaagtcttttaaaaatttttcagatacgctgtatttgaaacgaaataattgaatataatgaatacaatcacagccgcaattaccgctgttggagcttacgttccagactttgtactttcgaacaaagttttggaaacgatggtcgataccaatgacgaatggattactactcgtaccggaattaaagaaagaaggattttaaaagatgctgataaaggaacatcgtttcttgctataaaagcagcacaggatttaatagcaaaagctaatattgatccgttagagattgatctgattataatggcaacagctacagcagatatgccggtagcctctactggagtttttgttgcgacagaaattggagctaccaatgcatttgcttacgatttgcaggcggcatgttcaagtttcttatacggaatgtctaccgctgcagcttatgtgcagtcaggaagatataaaaaagtactattaattggtgccgataaaatgtcatcaattgtagattatacagacagagcaacttgtattatttttggtgacggagcgggagccgttttattcgaacccaattatgaaggcttaggcttacaagatgaatacttacgaagcgacggtgtaggacgcgattttcttaaaatttctgcaggaggttctttaactccaactacagcggagaccgtacaaaacaaacaacacaatattattcaggacggaaaaaccgtttttaaatacgctgtaaccaatatggctgatgccagcgaattgattttgcaaagaaacaatcttacgaatcaggatgtgaattggttagtgccacatcaggcaaacagacgtatcatcgatgctactgcaaacagaatgaatcttgaggattcaaaagtactggtgaatattgaaaaatatggtaacaccacttcagctacgttaccattagtattaagcgactttgaacatttgcttaaaaaaggagataatattatttttgccgcttttggtggaggattcacttggggatctatttacctaaaatgggcatacgataaaaaataaatcaaaactaaaaacgaatcattatggatttaaaagaaattcaaaacctaatcaaatttgtagcaaattcgggtgttgcagaagtaaagttggaaatggatgatgtgaaaatcacgatcagaacaactttagaaggaaatgtaactgaaactacttatgtacagcaattacctgctcaggcagcattgccacaagcagttgctcctcaacaaacagctccggtagttgtaaatgtaagtgctgaggcacctgctgctgttgaagattctaaattcattactattaaatctccaattattggaactttttacagaaaaccatctccagacaaaccagtatttactgaagttggaagcactatcgcaaaaggtgatgttctttgtgtaattgaagcaatgaaattattcaacgaaatcgaatcggaagtttcaggtaaaattgtaaaaattcttgttgacgatatgtctcctgtagaatttgaccaacctttattcttagttgatccatcataaataaatttagattttagattttagattttagattgatctgacagaattaatacagacatctctaattatctaattatctaattatctaattatctaattaaaataagatgtttaaaaaaatattaattgcaaatagaggagaaattgcacttcgtgtaattcgtacatgtaaagaaatgggaatcaaaactgtagcagtttactctacagccgatgctgaaagtttacatgttaagtttgctgatgaagcggtttgtattggtccccctccaagtaacttatcgtatttgaaaatgtcaaatataattgctgctgccgaaattactaacgcagatgcaatacatccaggttatggatttctttctgagaatgctaaattctcaaaaatttgtcaggagcacggaatcaaatttattggtgcagctcctgagatgattgacagaatgggagataaagcttctgcaaaagcgacaatgaaagcggcaggagttccatgtgtaccaggttctgacggattattagaatctttcgaacaaacacaaaagttagctaaagaatttggttacccggtaatgcttaaagctactgccggtggtggtggaaaaggaatgcgtgcggtatggaaagaagatgaattattgaaagcatgggaaagtgcacgtcaggaagctgccgctgcatttggaaatgacggaatgtacatggagaaacttatcgaagagccacgtcatatcgaaattcaggttgttggagattcatacggaaaagcatgtcacctttctgaaagagattgttctgtacaacgtcgtcaccagaaattaactgaagaaacaccttcaccattcatgactgacgaattgcgtgcggcaatgggagaagcggctgtaaaagcggcagaattcattaagtacgaaggagccggaacagttgagtttttggttgacaaacacagaaacttctatttcatggaaatgaatacccgtattcaggtggagcacccgatcactgaacaagtaattgattacgatttaattcgtgagcaaattatggtagcggccggaattccaatttcaggaaaaaactacttaccacaattacacgccatcgaatgccgtattaatgctgaagatccttataacgattttcgtccttcaccaggaaaaattactacgcttcatatgccgggagggcacggagtacgtttagatactcacgtatattctggttacagcatcccgccaaactacgattcgatgattgctaagttaatcacaacggcacaatcaagagaagaagctatcagcaaaatgcgtagagctctggatgaatttgttattgaaggcatcaaaactacaataccattccatagacaattgatggatgacccaagatatattgcaggagattatactactgcttttatggatacatttaaaatgaaacctatagaggaatagaagtaaaggctgttgatttttcaacagcctttttttatgttaccaactggtaaacccgataggttttagaacttatcgggtttgttttttagtgaagtaaacactttcggtgtgtattttttatacaggttttgcctgggttacacactttttataaattttaaattttggcacaaatgatttaatccctttaaaaataaggacttaagtaattgaaggtacaacgttttcgttacggcataataatttcattatctaaagcgtaaacaactattaataatttaaaacgtacacactatgaaaaatttatttctatcagccgcaatcgttttgggaggtttaacatcatttgcttcaaatgctccaattgcaaacactatcgttaaaacggtttctgttgcagacgaatatacagagatcaaattagaagagatacctgctccaattacggaagctttgaaaaaagcctatccaagcgctgtagttacaaaagcgtataaaaacgaaaaatccgagtacaaattagacgttacagtaggagaaaaggtaggtaatctttttgctaatgcagacggaacctggattaaaaaataaggtaaagccgttcttatgtttatacaaattaagaacattaaaataaaattaagagtgcttaaatatacacactatgaaaaatttatttctatcagccgcaatcgttttgggaggtttaacatcatttgcttcaacttctccaatatcaaatacaatcgtaaaaacagcagttatccaggacgagtacactgaaattaaagtggaagaagttcctgctgctgtaatcgatgctcttaaaaaagcgtatccggatgcaatactttcaaaagcatacaaaaatgaaaaaacggagtacaaactgagcgttacagtaggagacaaagtaggctctctttatgcaaatgcagatggaacctggatcaaaaaataattaataagaaccattaaaaaggatcattatgaaaaagttaatcttatcggcagctatcgtgttaggtagtttgtctatgcaggcaggaaatggaacaatgacaggtttattggtgaaaactgtaagtgttcaggatgaatataaagaagttgatgcagttccggctgcgatcaaaaccgcattagacaatgcttatccgggagtaaaactggacaaagcttatgtaaatgcaaagaaggagtataaaatagagataaccgttagaggagaaaaatctacagtttatacagacgcttccggaaatattcttaaaaaataacgattagtaacccataaaaaccatttattatgaaaaagttaattttatcagcagcgattgttcttggaggtttatccgttcaggcagcgacttcgacagtgaaaacttcagacattcaagctgtagttgttcaggatgaatataaagaagttagtgcggatgcagttccagcagcagttaaatcaacaatcgaaaaatctttccctaacacaaaacttgaaaaagcgtataagagtgagaaggatgagtataaattggaaatttccagcggagataaaaaatacactgtgtttacagacgcttccggaaatattcttaaaaaataattgcctaattttatcagctaatagtaattaaaaaaagcaagtacttatgaaaaagttaattttatcagctgtcatcattttaggaggtttagtaacgaatgcagaagcgactacattaaaaaaatcagttttgaatgtcgttacatttcaagacgattttaaggaaataaaaccagaagcgcttccagctgaagttaaagcgactttagaaaaatcttttccaggttcgaagcttgtaaaggcttatgtaaatccgaaaaagcagtacaaattagaactgaattccggggctgatcaggagaaacattttgttttcacaaatgacaaaggagacatttccccgaaatattaaaaaagaataatatgaaaaagttagccttatcagtagcagttgttttaggaagtttatccgtttctgcgaatactgttgtttctcaggagcaaataaaaattgctgttaatgttcagacagaatatacagaagttgctgcagatgctgtaccagctgctgtgaaaacggcactacaaaccgcttatccgggtgcaaaacttgcgaaagcctgggtaaacgaaaaaaaggaatataaacttgagatatcagttggggaccaaaaggctactgttttttcagatgtcaatggcaactggttgaagatataattaggtgaattttagatttatgtttttggtgaaaaagagattgcgataagcaatctctttttttttacataattttgtgaaaagacaattttattagtattattttagcaaaaaagtcctcagaaacaaatgccaaagatattactgatagaagatgatatttcgttctgcaaattattagagaaatttctaatcaaaaaaacatacgaagtagctattgctttctcagctgccgaagccagagttgcaatcaaaaaagaatctttcgatttgattttaacagatctccgtttacctgattctgatggtatcggtcttatggccgaaattaaaacggcataccctcaagttccggtaattttgatgacgggctactctgatgttaatactgcagtgaaagcgatcaaaaatggagcagccgattacatttcgaaacctttcaatcctgatgaagttttactggtcatcacaaatgcgttaaaagcttcagaagaggagacggatgaagtagtggtgaaagagaagaaaaccgcaaaaaaacaaactactgccgaaaacgaatttgtaaaagggatttcgatagcgtctaaaaaacttctggatcatattcaattggtaagtccgacagatatgtcggttttaattattggagagagtggaacaggaaaagaaattattgccaaaagtatccatcagcaaagtttaaggaaaaacaataattttattgcagtcgattgcggagctattccgaaagaattggcagcaagtgaattcttcggacatctaaaaggatctttcaccggtgctatcagcgacaaaatgggttattttgaagcagctaatggcggaacgctttttttggatgaaattgggaatctttcttatgagaatcaaattcaactgttaagagcacttcaggaacgaaaaattaaacctgttggaagtaataaagaaataaacgtcgatattcgcattattaccgctacgaatgaagatttgcgtgaggcagtaaaaaacggcgattttagagaggatttataccatagaatcaacgagttttctatattgtcgccttctttaaaagagcgggaggaagatttgatggttttcgccgattattttctggaaaaagcgaaccagcagctgaacaaagaggtgattggattttcacccgaagtagttgcaatttttcaaaattacaactggccgggaaatttacgtgaattgcaaaattgtgtcaaacgttcgacattgttgtccaaaggtgaatttatcgaaagtgatgttctgccggcagagttttttcagatacaaaagccaacaagttctaatgataatttttcgttatctgaaaatgaaagagaagccattattcaggcgttatcgagagcgcaaaataacaaatcggaagcagcaaaattacttaagattaccagaaaaacactttacaataaattaaagcattacaatatagattaaacgatttcttgtcgtaaagcgttaaaaagtacatttgttttagattttaaggtactcagtatactgtctacttcagaaatgtcaaggttcgtactttccaaaacttttaaaatttcactaatctcttgtgtctgaatttgtttaaacataggagccattcgatgcgcaattaagttaatttcgaccgtgctttttgcttcgaaggcattttctaaagcgttcagattctcagaactgttttcaataaacgctttcaggatttcttttagttcgtcattgtcgtcgcctaaaaactctttcagcgtatccagtgaatacaatgttgaatttaccgtttcttcctctttgttaatgtcaatattgggcaatgtgtcgttttccaaaattagatgaatcgtctccaacagtattttaggggaataaggtttttgaattaccgtggtaaaacctgccttggtataaattgctgcatccagatcagttcttccggttaaagcaattacgggctggtttttaaaagtggagtaaccgctgtttttgagtttttccaagaacataaaaccgtccatttccggcatttgtatgtcagtgataataaagtcgaaaggagtacttccaatggcttctaaagctttttcggcactgttaaaagaaaatacctcatgtttttcctgtctcaaaacaccactcgttaagttcagaagattaatatcgtcgtcaagaacgataaacgtttgttttggagcattcagtataacggattctttctcttcaactactaaattttgactgttatcaaacaataaaggaagttgaatttgaaaagtacttccttttccaaaagtactttcgagacttaagcttccgcctaaaatcgaaattattttttgacaaatggataatcccaagccggttccaccatattttttttcgattccttcattcgcctgagcaaattcttcgaaaactaattgctgattccctttttcgattccaattcctgaatcttgaatagaaacaacaaaaaaatcatcattttctgtggtgtaagcgcttatttttatgaagccttcttcggtaaatttataggcatttccaatgatgttacttaaaatttgttttagtctaaagggatctccaacaattcgggcattcaatttttcatcaacgttaataataaggtcgatgttcttttgtttgtaaacggtttgaatactcttggctactccatcaattatttccggcaataaaaatgggaccttctcaatggtgatttttccagcctcgatttgagaaaagtccaataagtcctgaaccagctgtgtaatgtattcagaagaatttttaatgtttttgatgaaataagactgcttggaatttacctcagaattacccagcaattctgaatatcctacaattgtacttaaaggggtttttaaatcgtgactcaccgtagaaatgagctgttcgcggcttttcagtaagttttttgttttaaaatttgcaatctccagcttctttttataaacctgcgatttagagtaatcactcacaattaggatcgagaaaaataaagtaagcaccaagccaataatagccgaagccgtaacaatatcattcacttttttaagcgatttttcttttaaagaattgttttttatcgagttgatgatgatttctctttcgataattcgaagtacttttcgtagctgttcagaaatcgcgatttcattttttaataatttgttttcttcgaagtttagtgattcttttttcttttcagctttcagttttacattgcttaagagtttcttcgaattggccaagatggaatccgaggcttgtttgctcagggtgtttgtactgtcgtcagggatattctgattgagataatccacatatttttgaagtacattgcgctgataactccctaattgattcggattcttgttgaaatcctgaagttctaatttacggagtttaaactccattttggtgatttcatcaattgccgtatttaccgagacttcatcgtcggctttattttttatggtttttaactgtttgatgttttttgtcttttccgacaacaggtatgtaacactgtccagcagggtcttttgatattgtgtggtaacaatttgttttaaggtatcgattctggatttcaaagaatcggtttcgataaggtaatttttgaaatcatcctcagaattggtctggatggtttttcgggctaaactttcggtcttgtaaacgttagaaaacagtttgcttacttttaagattttagttttctcaaaagcaatcttactttcgagtttattgtaaaccacattttctgaatacaaaaaccaacctacggtaaccactaatcccagtagagcaatataactgaagagtacttttatcggcatgtaactttttttactctccatggggtaatgttataggtttttggatgcttataatggaaatcagtgcaatttatttaaaatttcggtttttgaaatacaaaataatgctaatgttttacataattaagagggctcggaaaataaaatagccgcagattctgaaaatctacggctattttttaatttaaaatctacggtttaaagcgtctcgttcaaccatttgaagaattcaccttgccaaacctgagcgttttgcgggtgtaaaacccagtgattttcatcagggaaatatacaaatctgcttttaagtcctcttaattgtgccgcctgaaaagcttcttgtccctgtccgattggtacacggaaatcttttcctccctggaaaattaagatgggtctgttccagttttgaaccattgttgcagggttaaaaacagtatacgatttttgagctgctgcattgtctttttcccagtacggacctccaaaatcccagttgttaaagaaaacctcttcagtagttcctaacatactcacggtattgaaaacaccgtcgtgagcgataaaagttttgaaacggtttttgtgaatacccgctaggtaaaacacagaatatcctccgtagcttgcgcctacacatcctaaacgggatttgtcgacatagctttctttagaaacatcgtcgatcgccgaaaggtagtcatccataacctgtccgccccaatctttactaatctgctcgttccattcaacaccatgacccggcattccgcgacggtttggtgcaactaccacataaccttttgcagccattaaggagaaattccaacggaaagaatacgattgtgttaaagcactttgtggcccaccttgacagaataataaggttgggtattttttagaagcatcaaaatttggaggtaaaattacccaaaccaacatttttttaccgtctgtagtagttacataacgtttttctgttttgctaggtgctattgttttgtaggtttctgtatttacatttgagatttgtttccaggtgtttttctttaaattaaaagaataaatttccggagcgtgattcatgtcatttcgggtgacaataatatcatcaccggcaaaacctactaaatcattcacatcaaaatctccattagtcaattgacgaacctgaatagcgattctggtcaatcccggaaagttaactgtaaaaagctgttttgtaccatccaccggagctacaaagtatacatttttaccgtctttactccagataaaattatctacagttccatcccagtttgccgttaaatttgttttaatgcctttaaattcaacaataagatcgtttttatccgcttcataaccgtcacgtttcatttgcagccaggttaagtttcctgttggggaaaattgtggcgctgtatcgtaacctaaattaccttcggttctgtttattgttttttgagtttctaaattatactcgtaaatatcagtattagtagaaattgcgtattgtgttcctgcttttttcttgcacacatacaaaatgctttttccgtcaggggaccagatgtaatcttcgtcaccaccaaaaggtttttgcggagaatcaaaattctcgcctttcaggatatcaattccagcggcaccttctttgttttctttgtaaaaaacatgattgaatttaccttcattccaggtatcccaatgacgataatccaatccgtcataaatttgagcatcagatttatccagttttggataaaaatctttgcctaaaactttttccagtttcacctcttcgttgtacactaaaaattttccgtcaggcgaaacgtttttgtctgctaaaacttctttagtgtctttaatttcggttgcagttccaccacctataggaatgatgtaaaatttagaagacgatttgttttcttcaatagaaggggtcgaaaccttaaaaacaacattttttgcatctttcgaaagtccgagcgcactcactcttcctaatttccataacaactctggggacattacattttgtccgatagcgtttaaactcatcattattaaggttgtaaataatacttttttcataataaaattctaatttttcgtgggactaaaaatacaacaattaaattccaaattagctaaattccaaattccaaaaattgttaaagtttatgggctaagtttttttagccacgaattcacgaatttttattcttaaggatcagtaaaaataattcgtgaattcgtggctaaaaaaaaatagtacgcgttttggaattttaaaaaatgaaagttccggtttaaatttatttcctaaattgtgatttggattttaactaattgtgatttattattttatgatggaactaagctactgggaactcaaaaactggtttacaaatgttgattatactattgttggcagcggaatcgtaggactgcacgcggcactgcgcttacgcgaaagatttccggtcgcaaaaattctgattttagaaaaaggaatgctgccgcaaggagccagtactaaaaatgccggctttgcatgctttggaagtctttctgaaattatggaagatcttaaaacacattcagaagaggaagtgatacggcttgtagaaaaaagatggaagggcttgcagctgttgagaaaacgattaggcgatactgcaatagattttaaaccgtatggcggatatgaattgtttttaagagaagatgatttaaattttgaggagtgtatggcaaggctgcctttcgtcaatgaaattttaaaaccacttttcaaagcggatgtttttgccaaagaattcgatcggtttggttttggaagcagtcacgattatttgatttttaatccttttgaggcacaaattgataccggaaacatgatgcaggaattgctgagacaggctgttgctgagaatattttaattctcaaccagcaaactcttactgcttattctgacttaggaagtgaggttgaactggtgttgaatgattttagttttaaatccaaaaaagtacttttcgccaccaacggttttgcagctcagttgacaaaaggagcagtaaagcctgcccgagcacaggttttgattacagagcccattgcaaatttagccatcaaaggaacttttcatctggatcgcgggtattattattttagaaatataaacgatagaattttacttggcggtggcagaaatcttgattttgaaaccgaaacaacaactgaatttggggagacgaaaattgtacaaaataaattggaggatttacttaaaaatgtaattttaccgaatcaggatttccgaatcgcccatcgttggagcggtatcatgggaataggaaacagtaaaaatcctgttgttactcaattgtctgaaaacgtgttttgtggagtgcgtttaggtggtatgggagtagcaatcgggagtttaataggaacagaattagcagatttaatataattttaaaagaatttaattcaaaaataccacaacccaaaaaacggataatacatgcaaaaaactactctagttgttcttttttctttttttacctttctttttacacatgccactaataaaactaaacctattgtagccgatccggtttttgatgtaaccgtttcacttattggtgaagttttggttgaatatcatgcatatgatgtttataatacttacgaatggcagttcgaatatgggcctgcaggttttaagcctggggaggggatcactaagactctttccggtataaacttttatcgatttacattagatccattaagaaaatatgattttagagtcagagagagacgtttgcaggggacaatttttttatggggaaattggtcagacacaaaaacgatacaggcatcaagtgataaagtcttttctgtgggttatgcgacaaactttaatgataaaaacaccacaaatttagagtggaggggccttatctataacaatagcaccagtatagccggtgtatctcttacaacctataagaatcatagcgaaaataatgcagcaggttcttcgatgataatggctagttataactatgacgataaaagccatattggtttgatatctccaagattcaatgatttagccaccgatcgaaaaataaaattttggctaaacggactttataattcggatacagaattgttagtcgggactatgagtgatcccaatgacaaaaacacatttcatcttctgcaaaaaatagaaccaaaattagggttagaatggaggcaggaaaccgtttattttactaattataatggcaccgatcaatatgtggtgttcttttttaagaggggatactatgggagtaacagtaccagtttgtatatagatgattttagttacgaaaaagcatcagattgtttcaatcagactaattttgccgtatcaaacgttcagcaaaatagtgctcagataaattttgatgctcctaatcaaaataattttcaagtgagtctgactaatacagttaagaaaactactgaaatttttactattcagagcagctcttttactttggataaattggttggaaatacagattatgaagtaaaggtacgcgccaattgtattgatgatttgttctctaactggactaagacaataagtttcaaaacaccttgtaccgtaattacagataggtacagtacctcttttgaagggacaaaatatattgatccttgctggagtgtgattgcaggaaaatgtttggttcagagtagtttggaagatacgggctgggcaagaaagcccgcacctaaaacaggtacgacaacgattgtaatgtcgaaatttgtaggtgctttaaatgttgataaagcctatcttgtaacaccatatattgcagatctggattctgataaaagaataagatttagtcttttagcttatagtagcgacgatgactataataaaacttcgctgaccataggaacaatgtctgatcctaaaaatgcagctacttttgttgctttaaaaacaattctgccttcagagataaacgagactgaaaacggatataaatcttcgttatggaaagagcataccgtttatttagataattacgtaaagagcaataaccataattatattgctttgaggtacaataatgaaagtgattcctattttagtatcgatgactttacgtatgaaaagacacctgtatgtctagaacctcttaatcctaaaaccatcaatttgggttatgattctgccactgttagttgggaaaattataaacctgcatcacaatttcaaatagaatacggaccaaaaggatttgctcatggttcaggaaagatcgttgatgcggcagtaattccgtttaagttagaatcgcttcaggacgatacagatttcgatttttatgttcgtgccaaatgtggaagtgaatacagcgcgtggtctgacagaggtaattttaaaaccaaatgtttaggattaacggctggttatactgaaaattttgaaaatgccgcttttgaaaaaaatggatgctggaccagaattgtgccttatatttatcagaggtattatcgtaaagatcgttttgtgaatattaatacgatcaataacggtagttctacggtgcgtaatggttcccaatcagtattgctttcaagtcagttagatcttgtttaccctccgggaacgggagaaaaaacggatagagtagtgctggtttctccgagatttaaagattttgacaatcataaaaagatcaacttttggatgcaggttcctaaagagtcagatgacctgtcagtggaacttatcataggaaccctttcagatccggaagattattctactttcaaagcttataaaactattgtagttccggttgcaaataaggctaaatggctgaactatgatgttgatttttctaattattttggaacggataaatatatcgggttcaaacaaaagattagtaatcaacgatcaaccaggttttttatagatgattttgaatacattcagaataactgtccaattcccggaatattaggtgcaagacagtcaggtcctgatagtgttttgctggattggagagataataatactctaaaaccatctcaaagttttgatattgagtatggacctaaaggttttgtaagtggttcaggaacgataattaaggtcactgaaaatccttataatttggcgggattagctcttggcacttacgagtatagagtaagagcatattgcgataccaatattacctcagattggagtgatagatatacctttaaaactttttgttcaaaaacagcaccttttgttgagaattttgatgaacatggcaggaatttagatcaaagtactactttttgctggagttacaatattcagctttatgcgcaattagcagaatttaatttgccgaatattaccagtgcgccttatgcttttgcattgtatacaaacaaagacagtgcaatattgatttctccttatctggatgattttgataaaaacaaaaaagtaaaattttggcttagaggttcgcaaacgggtagttcgaaagccggaactttaattgtaggaacaatcaagaatgctgcggatcttagtacattcgaaccttatctgaccattacagagcaggaaattaatagtttgccactatacggaaaagaagttaatattgacttctctcagtaccagggagcaaacaaacagatcgtttttaaatatatggccgaatcaactaatggagactacgtacgaaacactcttttaatagatgattttcgttatgatcagactttaccatgttatgaaccaatagatgtagttttctctgatattaatcataattcgacgttaataagctggacttctaaaaatcaggcaacagaaaatgttcagatagaatacggattaaccggttttgctaaaggtacgggaactattgtaaacaccaaaaagaatgagattttgatttctaagctgcaaatcggaacctcgtatgagttttatttcaaaaccacttgcgcatccggtaattcattagaagcaggaccgcgaaaaatagaaacgacatgcgagtcactggcactaccgtggaaagagaaatttaccaatctgagtcgttacggaacaaacgtccttccggattgttttaagtttttaagaggcgaatttattttagaaaatacagctaaggatgatcttaattatagatttagtcccgattataaaaggtcgggatttgatgataccggttatttatatcttaccggtggatttttgactcagatcatgactcctatgttttatttaaatgcggggactacttataagtttaacctgaaaggacgaaatagttacgagtatcgtattcagggtgttgggttatatgttggaaaagggcaaaacgattacaatatgtcacttaatattagtcaaacagggaacaacgatagactgaccgaatacaattatagagatgtatcttattacttcacgcccctggtatcgggagactatagctttttgatggaatttgccaattcgggtggttcacgattacttgttgatgattttgaattgaaagaaggatatacgtcttctatcgatggaagtggaaaaacagtaacatatgactttacaaaaatgccgccaggagagttgatttttgaggggggcaataagagaattattttagattctagcaataatatactggtgatgaaaggaaacagtacaccatcagaatggaagaatgtcaatggaacttctcaaataaagaaaggagccgctgttgagaattcttcggtatgggaaagaaatgaaagtagtatcgccaagataaatacaaaagtaaatgcagcaaatgcaagcagtttatttatgcattttgatctaaaacaaacctttgtttcttcaaatacagaatcaatgtttagagttgtcgtaaacgggaatgtagtgggggatgtaataaaaccagagtcggccagcggtgatgattataaaaaatacacagttgatttgacaccatatgttggggcagatattagaatatcattacagcatattggtaaatctgatgccggagataatgcttatctggataatcttgtgtttgataaaacatcgtcactgggtattgacggaactcatttttccaattttaaatattatcctaatccagtagaaaatgttttatatatagaaagtaattcggtactttcgaaagtagaagtttatactttaagtggacagttgctttctataaataattactcggattctaaagttagtattgattttaaaaatcatgcttctggggtatatttgttggtggtaactcaggatgataaaaaagaaacgtttaaagtaataaagaagtaatgttctaagttgtactatttttagtattacattttagattaacagatttaatataatggcagcacccaaaaaaccggcaccaaaaaaaacaaccaccagtaaaccaaaaccggcaccaaagaaaggcaatcgctcttttggcgaaaaagtaaagtggtttttcatcaaattatttttatggttcttcggaatctcgattgcgtctgttgtgttttttaaatatgtgcctgtaccttttactcctttaatgatcattcgggcaatcgaaaataaaacggctggtaaagaagtctattttgatcatgactgggaacctatcgataagatctcaatgaatttgcaaaaagcggttattgccagtgaagacggaacttttctaaaacataatggtttcgattttaaagcacttcaaaaagcctataaaagcaacgagcgcggacgtcgtattcgtggcggaagtaccatctcgcagcaaaccgctaaaaacgtttttttatggcaggggaaaagttatttccgtaaaggtttagaagcttatttcaccgttttaattgaactcatttggggcaaagaacgtatcatggaagtctacctgaacagcatcgaaatgggagatggagtatacggtgcttatgccgctaccgaacattggtaccgtcgtgatgcttcaagtctaacaccaatgcaggcagccggaattgcagccattttgccaaacccaagaaaatttaaagcaacaggatcttccagttatatcaaccgaagaaaggaacgaattgttcgtgaaatgcgctcggttgggaaaataaattacaatgcagaataaaaaaagctttctcggattcctgttattgacgacgattttgagttttggacaggcgaaaacgacagaaataggtttaattacagataacgatttgtatacttcgtctaaaaacgatatgtactataccaatggcctggagcttttttatcgttttttgtcgaagaacaataacgaaaaaatcaacaagaaaatcactgaatttcgtattgggcagtatatctataatccgagatttataaacaaagaagctgttacgattaacgatcgtcccttcacaggttatctttttgccgaagcaggacgaagttttttctataaaagcgaatccgttttaaagaccgattttcaacttggttttatgggccctaatgccatgggaagagaaactcaggaaagtttccatcatcttattgggtacaaaacggtgtatggttgggaaaaccagctgcacaacgcattcgccattcagatgcatgtaatgtattcgaagaaattgtttcctgcaaagcacaatgattttgtcgatcttcactttcagtcggaagccaatgtagggacaatcttcacaggtgtttcaacaggtttactgactagaattggtttcaaaaaactactcccggtttatgattccaatttacacgatgcctcggtaagcaatactcggcaatacaatatccgtgagttttacttttacgcaatgccaagtgtcaattaccagttttacgacgctaccatcgaaggcagtatgtttagcaacaccagtccgctaacgtttgacttggaaccccttcgtttcaatgccgaggcaggactaaaataccgacacaacaacttcaatatgtcgtactcgtttatctatcggggcagagaattaaacgatccgaatacaaacaccaatgcggggtatttttatgggtcgattcgatttgggtatttgttgaagtaagctcttgtaattttggttttcggtggtgtaaatatgccttcaggatttcgtgaatctttgtgtgtacattttgtgaatctctgtgtaatgtctcgattagaatgatgatttttattctgacagctataagaaatacgcgataaaattggggttaactataatcggatataattcccgggtaaatgtccttttgattctattgtattatctgtctttctgaaaaagttaaatcggattaatgatccttcaagcccctgaccaaagtctacaatatacaaataatcagttttagctatttgttgcgggatgatttggttggaggatatcctaatttgatttttactgaaagaataggtatttccgtcagaattgtatttgatgtcatttttggtaaaagtaaggatcgctccggttgtattatccttccagcttccttgtatccaggaaggagaatggaaaataccctgggtgttttcgtcgcttgacgaacaagaagtaataaaaataaggcttaggagtaaaattaaattcttcatttttttggcgtttaaaagttgtattcgataagtttagcaaaaacaattccgaactctcttcttttgatacatttaacttttatttatgggtacaacctcagtttttatgaaaatattaaaacaaatctttctaacttaatggagtgaattgtaaggagattgttttttcgcgagcaattttttcgattccggatttttttaagttaaggtttaactttttggtaatgttacaaagcttctaaatttttatttttaactcaaaattaaagttatggaaatcaattggatagtaataggagccgtagtgcttgttgtaatcatcgtgatcgtatttacagtcagaaagaatcaaagagagaaaaagaaactgacagatctcttaaataatgattttaaaaaggctaaaaaagatagagtagatgccgaagattctgcgaatgaacagtaagaaattttctttcaaaataaaaaaaccgtattccaatgaagtaatacggttttttagtggagaataccggattcgaaccggtcaccccttgcctgccaggcaagtactctagccaaatgagctaatcccccgtgtaatttgtttggtggagaatatcagattcgaactatcaccctcccgatttttcatcgggacgctctagccaaatgagctaatcccccgtgtgatttgtttggtggagaatatcagattcgaactatcaccctcccgatttttcatcgggatactctagccaaatgagctaatcccccgtgtgatttgtttggtggagaatatcagattcgaactatcaccctcccgatttttcatcgggacactctagccaaatgagctaatttcccaaatacgagagcaaattaagtcaattaattttcaaaaagcaaatttcaaatcacttccgatgaaaatatttttcaaaaccgtaactttacgatcaaatttatttttatgagtgcagaaaaacttgaaggttctttacagactacttaccataatgctgttgcaacagttgaatttgggcatccggccagcaattcttttccaagacaattattagatcgtttaacttccgaaattaatactctaagtcagaataaagccgtttcggttattgttttacaaagtttagggactaaagttttttgttcaggtgcttcttttgacgagttgctagccgtgaaaaatgaacaacagggagcacactttttctctggttttgctcatttgctgaacgcgatgcgaaattgttctaaaattattgtggctcgtgttcagggaaaagcagttggtggcggtgtcggaattatttcggcttgtgattatgtttttgcgactcctgaaagtgccgtgaaattgtcggaattggccatcggaattgggccgtttgtgatagaacctgctgtttcgcgtaagattggaaaagctgcaatggccgaaatgaccttggcagcacatgcatggaaatcggcagcatgggcattagagaataaattgttcacagagattcatactgttgaaaatttagatgtggcggtagcagattttgctcaacaattaagtctgtataatcctgaagctttgtacgaaatgaagaaaattatttgggaaggaaccgaacattgggaatctttacttgtcgagcgtgcctctataacaggaaaattagttttgtcggactttagcagaaatgctttagagcagtttaagaaatagcggaatcctaaatttttatctgattcctttcagagattttgtattatgatatttgtcattggatgcagcgtcagacaggcataaatttgaaatgtttttgaagtgaaacataaaaaataaatcaagatgaggattatttcgttgttgcagcaagttgatgttgcagagaaaattaaggctgctccggacggcagttatcagataggagtggtgatcggatcctttattcctttcgttgttttagtcggaattgcatattggatgtataacagagctaaaaaaagagacgagaacggttattaatttgtaaatttgcaacctaaaattcaaatcgatgagtaatatcagaattacaaaacaatttagtttcgaaaccggacatgctttgtacggttacgacggtaaatgcaagaacgttcacggacacagttataaattatcggtaacggttattggttcgccaattacagaccgatcgaatgtgaaattcgggatggtaattgatttttcggatctaaagaaaattgtaaaggaagaaatcgtcgatcagtttgatcatgcgacggtttttaatcaaacaacaccacatgtcgaattggcaaatgaattgaagaatcgtggtcaccatgtaattctggtagattatcagcccacaagtgaaaacatggtagttgattttgccgacagaattatagcacggttacctaaggagatttcccttttttcccttaaacttcaggaaacggaatcttcgtttgccgaatggtacgcttcagataattaatttagtcgaaagtcaaaagtcgaaagtcgaaagtcaaaagtcgaaagtcaagcgatctgataatttaaaacatctaagaaatccaacatctaagaagtccaacaatctaataatctaaatgaaaaaagtatattttgcttcagatcagcacttcggagcaccaacgcaagagttgagtttgccacgtgaaaagaaatttgtggcctggctggatgaggtgaaagaagatgcagaagctatttttttactgggggatttgtttgatttttggttcgaatacaaaacggttgtaccaaaaggatttgttcgtattttagggaaactggctgaaattcgtgatagcggaattcctgtttattttttcgtgggaaatcatgatttatggatggatgattattttgaaaccgaattaaatattccggtttaccatgataacaaggagtttacttttaatggaaagacctttttaattggtcacggtgacggaaaaggaccaggtgataaagggtataaacgtatgaaaaaggtctttactaacccgttttcaaaatggctttttcgttggcttcatcctgatgtaggggtaagtctggcacagtatttatccgttaaaaacaaattgatttcaggggatgaagatgtaaaattcctgggagaagaaaacgaatggctggttttatacgccaaacgtaaactggagaccaaacactacaattattttatttttggccatcgccatttaccgatggttcttccggttggagaagattccaattatgtgaatttaggcgactggattggctattttacctatggcgtatttgacggtgaaaactttgaacttaaaaaattcgagaaataatcactttgtttttgttataaacgaatgattttgagcgtttttttagtttaagccaactccgtaaacatattcatccagttcgattcggaataaagaaccttcaactaagtctttgattgattttaattctttgatagaaaccgccaaatctattgcagcgcaaggagttttgagcaggaatttatgacaggagttttttagttcgcaagcctcacaacacgcattttcaatcatactgtcctcaattaaatcacaaaaataattcagttcctgaaccgtgaaataaaatccggtttctttaaaaaccaattgtactttgtcggtgatggtttcgttttcctttttccagtaaaaggcaattccaaaattattatgatataattgttctatttctctcattacagattcttttatttcaacaaatatagatattatttatatttgttctaaataaaaaagtcttaaaaaaatgttttttttaaacgtataagttatataagcgaatttggttttctgtttaagtcaaaaaacatataatgtttatgaggtttaaacctcttttactgaaattttggaatttgaaaaattaaaaatggaatgttttattccatattatgatggtcgtccatgtctttttgaagatccagattcctaaaagtaggagagatcagtccaaagcctaaaaccgttagaagtgtgacactacccccaaaaattactgaagttaccgttcccattaatttggcagttgcgccactctcaaaggctcccagctcgttagaagatccaacaaaaatagagtttactgcacccacgcgtccgcgcatatgatccggagttttaagctgtaaaatcgtttgacggattacgaccgaaattccatcggcaagtccgcttaaaaataaagcaaaaacagaaagccagaaataggtagaaaagccaaataagatgatcgataatccgaaaacgaatatggcaatcaaaagtttttttcctgcgtttttatagagaggtacgtaagccgaaaccagcattgttataaaagaacccacagccggagcggctcttaaaatgccaaatccttctgagccgacttttagaatgtcttgagcaaaaataggcaataaagctactgcaccgccaaaaagtactgcaatcatatccagtgataaagctcctaatacaatttggtttctgaatacaaacgttaaaccttcggtaagactatcttttattgattctccaatctttgggtttataataggttttttgctgatttgtgataaggcaattaaggaaagtacagagaatccgaaaacaagacacatcgaccagtgaactccaatccaattgattgaaaaaccggcaacggcagggcctaatacagcaccaatttgccaaactgtactactccaggttgcggcatttggatatgcttttttaggaattatcaaggataaaagagaaaaaatagtcggtccaaggaaagctcggactaatccgcccaaaaagactaagatataaatagagtataaaattacatttgaagataaaccgccaacaactcttggccaggttaccagaaataatccgaaactgattaccgaaaagcccagaatacattttaccaataatcctttcttttctctttgatcgacaatgtgtccggcaaatagtgccattgaaacagccggtatgacttccattaagccaataattccaagcgatagcggatttttagtgatgctgtaaacttcccattcaattacaataaactgcattgcccaggcaaaaaccatcgcaaaacgcaatattaaaaatatgttgaattctctgtaacgcaatgcctgatacggatcaggtttgtttgaattatttttttccatttgttctgatgtctttaagcataagttggttggaaacggttccgttccattcattttcagccagagaataagccagctgaaatgggttttgattttttgcgagatctaatttttttccaagaccaaagcctattgcggcgattccatctgaattatgttgctttacaaaaagcctcaaatgttcctcttcagcacctaaagttttggcatagcccgtgtcttttatatccgaagtcataaaaaccggcgtcatgttctgggggccaaaaggttcgaattgttttaggatacggattagttttggagtgatgtcgctgaaatttatttcagcgtcaatttctatttccggcgttcgcatttccggaagtatggttgcagaaacttgtgtttcgaaagcttctttaaaggttttgtaattttcggctttcagggtcattcctgcggcgtacatgtgccctccaaattgttccagatgttcagaacaggcatcaagcgcattataaacgtcaaatccttttacggatcttgctgatgccgcatatttgtctccgcttttggtaaaaaccaaagtagggcgatagtaagtctcgattaatcttgaagccacaattccgatgacacctttgtgccagtcttcctgaaaaacaaccgttgaaaatcgatcttgttcgttgtttgctgcaatttgctgaaaagcttcttttgtaatttttttgtccagatcttttcggtctgcattgtattgctcaatttctgaagcaaactgctgagcctgctcaaaattaaactctgtgagtaattctacagcatgattgccatgtttgattcttcccgctgcatttattcgtggagaaatgataaaaacaacatcggttatgtctaatgttttcttttttacctgatgcaccaaagccttgattccgggtcttggatcggagttgataacctgtaggccataaaaagccaggattctgttttcacccgttataggtacaatatctgcagcaattgctgtggcaactagatcaaggtagggaacgagatcgtgtatggtttcgtttctgtttgttcctaaagcctgaatgagtttaaaaccaacaccacagccacacagctcatcataaggataagagcaatcgtctcttttagggtctaaaatggcgacagcgtccggaagagaatctccgggtctgtggtgatcgcagatgataaaatcaatgttcttttcttttgcgtaagcgatatgatcaatcgattttatgccacagtcgagagcaatgattaatgaaaatccgttatcgtcggcaaagtcaattcctttaaaagaaattccgtaaccctcatcgtaacgatccggaatgtaagtcgcaatattgggataatgtgatttcaaataggaagaaaccaaagaaacagccgttgttccatcgacatcataatcaccaaaaaccaaaatgttttcctgatttttaatcgccagttctattcttgaaaccgctttatccatgtctttcatcaaaaatggatcgtgaagctgttccaattgagggcgaaagaaatcctttgcctgatcaaaagtctctatgcctcgctgaatcaaaagtgttgcgacaaaatcttctacatttaaagcttgtgctaaatgcttgattttttcttcagaaggttttggttttatggtccaacgcattttaatggtagattttagatcttagatttcagattcttggaatcgtttaatttggatagctgttttttgccacggattacatgattttaagaatgtagatttcagaaatctaaaatctacactctaaaatctaaaattatttagcttctaaagcatttccttcaaactgaattccgtcccagcctaaattgatgaagtttctaatgttttgatggttagttccgttgggatcgcccaaaacttcctcgaaatagaaagctccaaaacaggccaaagtttcgtctttagttaagttttgcagttttgcgaaagagaataacttgcaggaaccggaattttctccggcagcattatgttgtgttccgttttggaaagcagttggagtgaagttgtagttttcttcaattactgcaatagtttccgggaatgttatttcgtttggagtttgttttactttttctaaaaaggcttgtatgctcatgattgtggtttatttttagccacagattagaagatttcaaaaggattttttattgttttttttctaatttaattcgctgtcatattagtagcaaacttcattatatcaatcagtgagaatcattttaatctgtggctaatattgtgttttattcttcttcgtttttcgaatatttacttttcttcgtttctttttctactgtttttccggcaacgaccacgacaatttcgccgcgtggtgctgttttttcaaaatgtgctaaaacttctttagctgttccgcgtacattttcttcatgcagttttgataattccctggagacgcaaacttgtctgtcttctccgaaatactgaatgaattcggctaaagttttgaccagtttatgtggcgaaacatataaaatcatggttcgggtctcctcggctaaagtcagaaaacgagtttgacgtccttttttgtcaggtaaaaaaccttcgaagacaaatttgtcattgggtaatccgctattgactaaggccggaacaaaagctgtagctccgggaaggcactccacttcaattttattctcgacacaggcacgtgtgagtaaaaaaccgggatctgaaatagcaggagttcctgcgtctgaaatcagggcgatattttcacccgccttcagacgtgcaattaaattttcggttgttttatgctcgttgtgcatgtgatgactgtgcatgtgcgtaccaatctcaaaatgcttcaacagtttgccactggttcgggtgtcttcagccaaaatcaaatcgacttctttcagaatccgaatggcacgaaaagtcatgtcttcaagattgccaattggcgtgggaacgatatatagtttagacataatttttctgaattctaaatggagttattggacacgaatttcactaattgacacaagttttaagtgtctttaggaattttacaaacaaaaggttcgtgctaattcgtgtaatttgtgttttagtttttatgaaaatttcttttctacaattcctaagaaacgttcggcgtaatcatcttttccatcccagttgttgtagtccggttttaccatatcctcaataaattcttttgcttcaccataagtgtcaaaagtcagtaattgatttaaaacgcggctgtaatcttctgaactgtttccaaaaagatttttagtgaatgcaattcggtcgtttaaatcaatgtgaaaaccttttgccagtttttcatttagagtggcagctttcggttcagcaggagtttctaatacagttgtttcaactgttttttgctctttgaactcattgattgacggtgttggtgttggtgttggagtaggagaaaccgcttcgaaactgtctacttttacaaaatgcgcatcggcatagtttacgcctaatatctcttcaaaagaaatgtgaacaggctccggttttgatgggctttctgcttttggctcctcttttttcggtttcttttcctcttgtacctcttctgatttgtccaattcaaaagcgggaataaaatcaggaatcggtttagagttactaacagttgtaaacgaaagttctgctgcagtttccggttcttttgccgtttctgaaattggttcttcagcttcttcaacaattggttgctctgcgatttccgcgactggttcggcaatggtttcaacaattggttcggcagctgtttcttcaggaatttccgttgttatttcttcaaaaatctcaggctccggatttatatcttccgagggttcgccaattgcttcttcagaagtttcaggatcaggatctgtttcttttgcagactcagcagtaatttcttcagcaattattggctctaatgtttcttcagctactatttcttcaacgattattggagtttcagtttcaacttcatttggaattatttcttctttttcaaagatagcttcaatttcagaatgcatttcgctgtggccaatggtaggcttcagagtgtcgaaattttcatctacaaattttaaaaccgctagtttttcatataatttctgcgtttcaagatacaattgattgatatcggatttgtttttaagctttaaaattcgatgagcaatgctgattaaatcggcttccaatttttttttcataactgttgaaattatagtgaatagggtattttagtatattttgtatttgaatgtcttcattcgtcgccgaaatctgaaagatatttttttatttctgttaatacgcgtttgcgaatcttcgatttgataaaaattttctacttttgaaaaagtgaaaaattgcgatttttcacgtcgatttattaccagtacaaagtaataaaaactattcatttttaaaggtagaaaaatacaaaatgtttctcgaaaatacagtaaatcacaaagaacaatttggttggattgaagttatttgtggatcaatgttttcgggtaaaaccgaggaattaatccgcagattaaagcgcgcccaatttgccaaacaaagagtcgaaatctttaaacccgctattgatacccgctatcatgacgaaatggtggtgtctcacgatgccaatgaaattcgttctactccggttccggcggctgccaatatctctattttagcgcaaggttgcgatgtgatcggtattgatgaagcacaattttttgatgatgagatagtgacagtatgtaacgatctcgccaatcagggaattcgtgtgatagttgcaggacttgatatggattttaaaggaaatccttttggacccatgccgggacttatggcaaccgccgaatatgtcaccaaagttcatgcggtttgcacccgaacaggaaatcttgccaactacagttttcgtaaaactgacaatgataagttagtgatgcttggtgaaacggaagagtatgagccactgagccgtgcagcctattttaatgccatgaaaaagattcaggataaataaagttttcttttcttaacaaaaaacaaacgaacagatgcagcaaccaactaaaaaaaagaatttaaccattttaatagtgtgtgcaattgcagcattattactggctttgattgtgtattgttcttttaaagagcctgtaacagataagggaatggttgaactggttgcaaaatacaatgaaaattgccctttaaccattcaggaagggattcgtttggataatgttacactgcctaaagataaagtggttcagtacaatttgactttgttaaatgtagaaaaagaaactgccgaaattgaagtaattaaaagaaacatagaagaaagtctgctaagtacggttaaagcaaatcctgggcttaaagcttttcgggataatgattttaccctgatctataattacgatgataaaaaagaaaattatctgtttcagattacgataacgccgagtcagtacaaataatttaacgactttaataagttaacccgacaggtttcaaaaacctgtcgggtttgttgtttttgaggtataaaaaaaacctaacagtatttaaaagctgttaggtttattgtttataggatgattttttttattgtagaagagtagaaaattaaattttcttcctcattcttgctaccggaatgtctaattgttcgcggtattttgcaatagttcttcgggcaattgggtatcctttttctttcaggatttcggccagttgatcgtccggtaaaggtttctttttatcttcttcttcaatggtattttgaaggatttttttaatttctaaagtagagacatcttctccctgatcatttttcatggcttcagagaaaaactctttgatcagttttgtaccgtatggcgtttcaacatacttactgttggctacacgcgagatcgtcgaaatatcaagaccaaccatatccgcaatgtcttttaagatcattggttttagtttggtttcgtcaccgtccagaaagtactcttcctgataatgcatgatagcattcatcgtaacaaaaagagtttcctgacgctgtctgatcgcatcgataaaccatttggccgaatccagtttctgtttgatgaactgaacagcatctttttgtgccgatgatttatcacgagaatctttatacgtctgcatcatttcctgataatctttagaaacgtgcagggaaggagcatttcgtccgtttaaggtaagttccagttctccgtcaacgattctaatggcaaaatcgggaacaacgttctctgttactttattgtttccggtgtaagaacctcccggctttggattcagtctttcgatttcgtgaatggcttttttaagctgttcgtttgaaacaccgtatttctgtaaaagtttgtcgtaatgtttcttggtaaaagcatcaaactgattctcgatgatatcaatagctaaatcaatatattcggttggagttttgtgttttaactgtagtaacagacattcctgtaaatcacgtgctcctactcccgaaggttcgagctcatgaatgacatgaagcattttttcgaccattttctcatcggtgtaaattccctgagtaaaagccatatcgtctacaatatccggaacacttctgcggatgtaacccatatcatcaatacttccaacaaggaattcagcgatttcgcgttcttcatcatttaaaataaaagtattcaactgattgattaaatcctgatggaaactaattggcgaagcaaaaggagtttcgcgctcctcgtcttcactgtaattgttcacctgagttttgtaatcaggggtgtcgtcgtcgcttaagtattcgtcaatgttaatgtcgtctgcttcgattctgtctgattcagcatcatcgtaatcgtcgtagtcttcattggcaaattcatcggcttcgtattcgtcttctttaccggcttcgagggccggattttcattcatttcttccagtaaacgttgctcaaaagcttgcgtaggcaattgaattaacttcatcagctgaatttgctgtggagataatttttgggataattttagatttaaaaattgctttagcatttgtttttgttaaaagtttcaagtttcaggtttcaagtttctcctaaatgagcacaacctgaaacctgaaacttgaaacaaattttattatattttaaaaacttagaacctcagcacctcagtaccttagagcctttttttaaaactctgcgttcccgggagttcttgggaaaggaattacatcacggatgtttgtcattccggttacaaacaataccaaacgctcaaatccaagtccgaaacctgcgtgagttgccgatccgaatcttcgggtatctaaataccatgataattcttcttcgtcaatttctaaggctttcattttttcaaccaaaacgtcgtaacgctcttctctttctgaaccaccaacgatttctccaattccagggaaaaggatgtccatggcacgaacggtttcttttccaggttcagtattgtcgttcagacgcatgtaaaatgctttaatgtttgccggataatcaaacaagattaccggacatttaaagtgtttctctactaaataacgctcgtgttccgactgtaaatcagctccccattcgttgataagatattggaattttttctttttatttggagtagaatctctcaagatgtcaatagcttcggtataagaaacacgtttgaagttgttctctaaaacaaagtttagtttttctaacaaagccatttcgcttctttccgcctgaggttttgatttctcttcgtctaaaagtcttccttctaaaaatttcaaatcatcctgacagtggtctaaagcatatttaattacatactgaataaaatcttccgccaaatccatgttgtcatccagattgttgaaagcaacttccggctcgatcatccaaaattctgccaggtgacgagaagtattagagttttcagctctaaaagttggtccaaacgtataaatctgacccaaagccattgcatacgtttctccttctaattgtccggaaaccgttaagttggtttctttttcgaagaaatcttctttgtagtttacttttccgtcttctgttcttggggtattgtcaaaaggtaaagctgtaactttaaacatttctcctgcaccttcagcatcagaaccagtaataattggagtatttacgtaaacaaaacctttgtcctgaaaatatttatgaacggcataagacaataccgaacgcacacgcataatagcaccaaacatattggtacgtacacgtaaatgtgcattttcgcgcaagaaatctaaactaggtttgttttttggctgtattgggaatttctctgcatccgaatctcctaagatttccagtttgtttacctgaatttcgtatttctgacccgcacctttactttcgatcaaagtaccaattacagaaatagcagcaccggtagtgattctttttaaagtttcatcaggtgtattttcaaaatcaacaacacattgtatattattaatggtagaaccgtcattaagcgcgatgaactgattatttctaaaagctctcacccatccttttgcattcacttcctgtaacgtcgtcgtactgtttaataagtctctaacttttgtgtgtttcatttttatatataattgatattaagtaatattcattttgaacaactgcaaatataatcgataataattaatttttgaagctgattcccgctcttcgctatatctttctatttttaaaggaaaaatagaaaggatgccgcttcgatcggggctagtgctctcggtttcaggagaggcattttttttattttgagttttgtcattccgaggaacgaggaatcgcactagtgagtctgtaaagaaatttgtcaatctttgtcgagtttcgactgcgattcctcgttcctcggaatgacaaactttgtgctaatttttatatttttctaaattctcattaaatattttaacaagctcggcatgatttatttgcattgatccagcagaaatcacaaaaggcgaaccataattgttgaaattatattctattagttttctctttatggcgttattttcgttttttatccagtattcaggattgttaacttcaataacaaccattttttgactttgtatttttagttctgaaaatgcctcaacattattccattcaatattttgagtaggagtttttttgggattgacattaattccgttttcatcaataagaattagtaatctgttttttaccagctgttttattgcagtaaaaagggccattccaaaaaataaaatcgagataattccaattgcttttataaaaattggactttatatatctaaaatttgctaaattttcagaatcaataaagaaccagattcctccagttacaaaaagaagtgataaaattagtaataagaatgattttttcttacttgaatatatttcgatcctttccattgattaattcgtgaatttgtggcatttcttatcgtgttaattcgtgaaattcgtgtttacctctctaaattctccaaatcctctttcttagcttttttcttctcaaaagtcaataccaaagccggtaaaaccaatagattcgcaaacattgcaaacgctaatgtacaggaaattaatcctcccaatgcaatggttccgctaaagctggaaagcgtgaaagtagcaaatcctaaaatcaaaaccaccgaagtgtaaaaagtactgattccggtttctcttaaagcactgaaaacggatttttttacctttccgttattctgcagcaaatcgtgatggtacttcgccataaactgaatcgcattatcaactgagattccgaatgcaatgctaaatacgagtatcgtcgaaggttttaacggaatgccaaaataccccatcagtcccgaggtgatacaaagcggtaaaatattggtgattaccgatgcaaaaaccattttgaacgatcggaacaagtaaagcatcaataccgcaattacaagtattgcaaaaatcaaagactcaattaaattatcaaccaaataagaggttcctttttgaaacactaatgcttttccggttacggtaacttcataacggtctttcgggaaaatctcatcgatcttgctgtgaagttttttctccacttttgccatttcatccgtaccaatatctttcatgaaagtagtgattcgggcatattgtccggttgaatctacataagctttcatcagattttctttgctgtttttagtagcatttttagcgtacgacaaaataaaagtttgttcctgcgatgttggtaattgataatattccggatttccgttatagaaagcctgtttcgaatacttcaccagatttacaatagaaactggtttcgctaattcaggcatttctgtgatggtgttttgcaattcatccattttgcgaatggtagaggctttcatgacaccctttttctttttggtatcaatcataatctcaagtggcattacaccgttaaattctttctcgtagaagataatatccttaaagaaagaggcgctttttggcatttcaccaatcaaacttcccgaaactttcatttgagtcactccaataacgctgaaggctaacaataaaccgtaaatgatatagattacttttcgtttattttttaccacattttcaacaaaatccaataaggttgaaatgtatgttttggtgagatggtacaaatgtttttcgcccggaaccgacataaaactgtagatgatcggtacaattaaaagcgtcagaaggtataccgaaatgacattgatagaggtaaccaaaccaaattcaaaaagcaaatcgtttccggtaatcataaacgttgcaaaacctattgctgtcgttaaattggtcattagagtcgaaactccaattttagaaatgatacgctgtaaagccttcgcctgattattatgaagtttgatttcctgttggtatttattgatcaggaaaatacaattcgtaattccgattacaataattaatggcggaatgatagccgttagaatcgtgattttataatgaaataatcctaaagttccgaaagaccagattactccaacaatcaaaatacagatggagataaaggtagctctgtacgaacggaagaagaaaaagaaaatcaaagaaaccgttaataatgccgcgccaataaaaagtccgatttcacctttcatattgtcagcattgatcgttctgatgtaaggcatgcctgaaacacgcaaatcgattcctgtggttttctcgaatttatcaattttcggaaccagattttccagaataaatgtttttctttcagcagtgtttacaagtgctttgttgatgtaaattgccgaacggatactgccgctttctttgttgtaaagcaatccttcgtaaaaaggcaaattatgaaacaagtcatattgtatcttttttaaatattccggatctgttgctttgctttgatcgatgaacggagcgagaacaaatttttcgttaacggtatctttctccagtttctttaaatcgttcaaggaaactactaaatctacttctttcgattttttaagccccgtcattaattcgttccaggcagcataattttttggcgtgaagaattttttatcctgaaaaccaatgacaaccaggtttccttcttcgccaaatttatccagaaatttttgatagtctttgtttgcaatatgatttttaggaagcaaatttgcttcggtataagtcatggaaaggtttttccattggtaaccaaggaaaatggtcagggcagcgaccccaacgagtatagaaattctatttttaagtatgattcgggctaatttttcccaaaatccaacttgtacggcgtttttcataaaaattgtaaaatggatgcaaatgtagtgaaaagtgctcgaaatcataaatattcggcttggtttttacggtttgttaacacaattggaatgttcccgcaatctaaaaatgggataatttgtagcattctacgctaggttttctcatctttgtatctcatttaaaaaggcgtagaaaatgaattggattttattagtaatcgcaggactttttgaagttgcatttgcctcttgtctgggcaaggccaaagaaacaacaggaatggtttcgacttattggatgattggtttctttgtttgtcttgctatcagcatgtttttactgtacaaggctacacaggtactgcctattggaacagcctacgctgtttggacaggaattggagccgttggaaccgttctggttggaatcttaatttttaaagaacccgctactttctggcgaatattttttctttcgactttaattgcctcgattattgggttgaagtttgtttccagtcattaagattttcctagtttctttaagaatagaagaaatgcttttatatattaggagttatgcgtatttaaataaagtgaaacgccttttttagggatgcaacacctatgttactatgtgttaaaatgaattacaccaacgtagattacattaggtagaaaatctttatcatctttgtaatctgtggcgaaaaaaacttttaaactttacataaacaatgcaagaaaacaatacaatcacttttatttttctggcgattcttttattgcttatcgttatcatctgttttttgatgtatcaattgatgcagttcaaaaaggcaaaggacgatgctgagaaaagtttctatgcactcgaaatgaaggttaatgacttgcagttggaaactctggagtctaaactgaatccgcatttgtttaaaaatattttaaattcgatacaatctcatgcgtaccaaacgtattttgctttagataaactggccaacgtattggactatattctgtatgagagcaaaaagaaatttgttactgcccgggaggaaattgactttgcgctcaatttaatcgaaatcaataaaattaaaatcagtccactctttgaattgaaaatcaaaaccaatgtcaataaagaagacaaattgtacgaacagcctttattggcaccgttaatttcgattgatttaattgaaaacgcatttaaacatgccgatcttcagagtgccgatgcctttatctcggtagtttttgagtttagggacaatgctttttttatgacggtttcgaataagatatcgaataaaaaagtattaaaaaaagaacgaagcggttttggtcatgctactttagaacaccgactaagaattatttataaaaataacttcaaactcgaaaggtttgtagagaatgacgtttatattgctcatctaaaaatagatctacttgaatacaaaactgaaatgcttgctgctggacgatgagctgccgggcttaacgtatctgaaaatgctttgtgaacagattcctgaagtggaaattgtaaaaacatttaacaatcccgaaaaactccttgtcgaaataccgaatctcgattttgatttgttaatatcggatatcgaaatgccagggatcgacggtttgcatctggcagaaatgctggacaataagctggttatcttttgcaccgcttacaaagagtatgctgccgaagcttttaatattgacgcggtagattacattaccaaaccggtaaaactcgaacgcttgcaaaaagcgatttcgaaagccctggagcgtttcgataagcctgatgcagcaaagaagttcattcagttaaatacagataaaggcaaaacattgctttacttcaatcagattctatacatcaaaacggcggttagtgacagtcgtgataaaaccgtacttcttactgacggcagttttctgaacttaaaaaatgtgaaattcgacacccttttacaggaacttcccgaagccgatttttgccgtgtcaacaaaaaggaaatcgtggccgtaaaggcgataaagtttttcaatcacaatgaaatcgttttgcatcatcaggaaaaagagggtaaaaacagtgcgttaattctaagtgaaacctatcgtgccgatttcctgaaaagagtcaaactataaaacgatcagctaaggacaaagtccaaagccctgtccggctgagcaaagtcctgtcaggctgagcaaagtcctgtcagcctgaacgaagatgtgtccggcagcgaagccctgtccggctgagcaaagtcctgtcaggctgagcaaagtcgaagccaaactagatggggagattaaaaaattttgcgtagtcgaactaaagttgtcacaaagatctgcaaggtaattccaattactattttcaattaaaatttcttcatcaatctgcatattattaataccatccattaattcttgaggcagattagtcaatagcttttcttcccaaaaccaggttattatttttttaaaaattatgatacaataatgtatatcatgttcactaggtatcgaattacaccctgtcgtatcatgcgaacctttatttgtatattttcttaaatcttcaaatttatgatatagattctcgttcaatttcacttggttattaaaccacttatgaaatttacaagtttctattaatttaaaaagatctaaagactttgccccactactaactatggaaaaatttgtattattcaaagctccattaataattttcataccatcacttccaccttttcgttgcataataataatcttgcacatcgcttcgcatccttttctaatataagtcaatgcactatcatcattagatttagcatgcttaaatgcttttaaaatatgtactattaaatcactcgttttctcagctacttttgatgccataatttttttttatttatttattttacttttaatacaagcttttttctgtcttgatcgtttcaaatgtaattaaacaaaaagcctttaaaccaagtaaaaacacctgatttaaacaagagttttttctcaagttccaaaataaaaacactgctacgcaattattttgcgcagcagtgttttttgtcaaattattaggctttataattaaagtttatttaacttgagatcaccatttgcatccgaatttccaaaattataagtaacattcaaaaaaccaagaaaattagatttctcaatatcatacttgatcgttaaaggaatccaaatatctttagttacacgaattctgaaatcggaactcgctaaaaaagtattctttttttcattagctaatttatttttcaaaatcgaattatactccatatataattttatttcaaatacactttggtcatttcttttaagcattttatagttaagaccggcagaatttctcgattctaatctttgaacactcttctctattaaagtgtcggagtaaattaaatttgatctaatatctaattccaggtttttaaaaccttgcaaaaaaacagtcccgaaagtaagtttcttattatttcccttatcgttagtagttccatttaaagaaaccgtccataatgcctttttttcaagatcggaatatttatcttttcttaattcatgaattctatcaatataatcttgcaattttatcgatttgtttcggttttcaaactcagtaatgattttattaaaataaatatttgatttacttaattcctctattttatcaaattctttatttgtcagtatagtgcttgctatacttatagcttttatatttgcacttaacttctcgtcatctgttttatctaattcatcaataaatttgtttcttatttcagataattgactcctccaaaattcatatttaagttcaagtgcagtttttgcaaaataagcaacttctttttctctctgattaattaaagcgtaagtaattccgccagaaaatcctttgtaattaaattgttcatcaaaattaagctttgtattgaactcaaaatttcttgaaaatttctgtttagaaaaaactatatctgttgtgatattctcgcaaaaaatagatttgataccgtataaggtagaattaaattcgacacttttgtttggccccgttaaattactagttcctaattgaaataaattagataaaacttctttgtaatttcccgattgtgaatcacctacttcttttctgattttttgtacttctttatcttgcgcaaacacaacatgaacagacattaaaagtagcaagcttataaaatattttttcatgatctgtttatttaaatttcgaaataaaataattcagtaatgaatggcttcgttgtcactcttttagcattataaaatggccctctggtaaaactacccactacctcaatttctgtttttccatttatagagttcattccaaataattgaagggtatatcgaccgctttctatattaaaatcttgattaaaagaagttggagattcatactcaatttctttacgagtgtctatatttttgatttcaactctaattggcaagggggctaatccaccactaattctaacttttaccttaattgttttcatgattcctatgtttttagttaacctttcaaaagtaccctgataacagtatatcaatcaattacccttttgggtgatattttattttttacaattctcactttattttttgtaagtttattctataaataccatttgtcttttttgagttaatttctaatatcacccaaaagggtaattgcggtcaatgaacttattgtacaactttgtaaaagaaaatgtaacgccatgaagatacaagtagccatagtagaggatgataagaattacaatcaggccttaaaaaatatcatcgatttccagcaggatatggaatgtgtggctcagttttttaacggtaaaaatgctttgcaaaaactggaagccctggaaccagacgtggttttaatggatattcagctgcaggatttatcaggtattgatcttgtttttaaattaacagacgtaatgccaggcaccacctttgttatgtgcaccagttttgaaaatgacgaaaaaatattttcggcattacgtgcaggtgcaagtggctatctggtaaaaggagatccgctggacaagataattcaggcgattcaggaagctcacaaaggcggtgcccctatgagttttgcgattgcaaagcgcgttttacaacattttcaggaaacaaaagtacaagtacaaaccttatcgttactgactgtaaccgaaaaagaagttcttgacttgctggcgcagggacttctctacaaagaaattgccgataaaaaaaatgtcaccatcgacaccattaaaaaacacattggcaatatctaccgaaaactacaggttagtaacaaaattgaagcaattaacaagtttaacaccaaaaactagaaaccatgaatgaaatcgacactattaaagaaaaagaaactttaaatttttcagaagtttacaacgacctgttaacagaattatcggaaaatcttgaaaataagggtttgaagtttggaccaatccctgaaatactaaaaaacagccttacgaataattttaaaaaatcaattctggcggctaatgaaaagcttaaccaaacgtattcaatgaacaaggcagttattaattttataagggaacaagactttaccttccttcgtttagaattagtagagtttgatgatgcttttagaaataattcattacaacttagaaaagcaagattagaatttgcctgctcttttgatgatcaaaaagagaaatatctgctaatggatgtacaaaaagaaatattattaactgatagaacaaccggaaattttaggtttaacaatctatttagttgtagtttacagccaatattagatgagtatgtaaaggaatatgatgagcaattaggaagtaaaacttcaaacacaaaaattatcagcataaagaaaagtgatttcaccggtttattgagaaatgtagatccctctgcggaagattttcaaattgtttttcatcccgctatagtaaaagacagagatcttgtgctttatgaagaacaacgtcgccaaaatcgcactactgctaccaatttcagggattataaagatcagtttagtttatttatgatagctggaaattcaactaaactcggagaaccaggtgcatacgacactttctgcttaaacccgcctactgttacatgtcctactattgataaaactaaacttgaataatttaattcagtcaactgcacaggacactttttgtttaaactcacctgatcactgttaatctatgtttttaatccatttatatctttttacaatagcagtttgtcttgccttttctattcaaaatagactggcaagacaacgctatttatggctttatttcggtgtagttcttattattgaaaccactaaaatttttggctggggaaatttctcctcagaaatttacacctatagttctttagcctatattttatatttttcaaattattatcgaatcgtaaaagtcaataccactttaattggtgttttagccataacctcaattgtattatacttttattttgtggcaagttctaaaaatgattatccaacggctgtgggtattttaatgagtacaatatacatcatactgtcattaatatggtttgtaaaccagttattacatacagattcggttcggatatctcaaaaacagactttttggattagcttttctttattgatttggtcaacatttttcttgttcagattgattcctatgtactggctcgatcttcatgataaagagtttctaaaagatataaattttggataccaaataattacgatcctgtcttattttatttttataagaggtttattctgtaaattttaaaccaatgagagagcttccccccgaaataaaactaacctatattatcgccattattataatgctgttgtttgtatgcttcattattatgatagtttttatttacaacaaaaaacagcttattcagcaacaggaaaaccaaatcaaagaaaccgagtttcaaaaccagttgctgcagaaagaattagaacgtcagaaagcgattcaagtagaaagagagcgtatttcgcaagatatgcatgatgatttgggtgccggaatttcggccataaaacttcaggcagaatttttaaaatataaaatgcctgaagaaagtttttcggaagatctggaagttattatagctacttcagaagatatgaatttagccatgagagaaattctctggagtctgaattctcaaaatgatactattggtaattttatagaatatgtgagtctctatgtcaaacgttttttagacaaaacgactgtaacatttcagctagattcgaatatcattgaaaaagaaaccaatttatctgtaaaagccagaagaaatctctttttggtagtaaaagaagccgttcacaatgtatacaaacacagtgaggcaagtactctgcaaattcaatttgaacagactgagaatgatcttaaaattacagtgaatgataacggaattggattttctgatacgattcaaaaaggaaatggtatcaacaatatgtcgcttcgaatggaagccatacgtggaacttttaaaattgttcctgctcaaaaagggacacatttattgtttgtgtgccccttagaagatcaaattttagaacagtacagtaaagaatctttttaatacatcaaaagcaggcttttccttatttatacaattcttctctgattttgattagagttcgaagggccttttcttcatcaggtttttcaggaagatttgaagttacgtaatgactttcgattgaagcaattaattgatcggccatttctaataaatcatcgtattctttatttcctgcttttatatctaataattcgtcccgattagaaactctgatatttaattttccagtggacaaaatctgttccgcagtttgtaaaagcctgatagtatgcatcatgtttttactgtcataatttttcccgtgttgttggttcgtattgtaacgatcttcgttgcgcttctcaatccaattccagtattcagtatattctttgcaatactttgaatagccatcctgattacaagacaagtaacccattagcttttcatcttttggaattgatgaaagcgaaacttcattggaggtttctttctgaataattcctttataacccaaaattttattttcgtcataaaacatggcaaacattccttttgaattaggaagatttactaaacctatttgttcctgattccagttattctcttttaaaaatgccaataaagaaactgtttcatatccatttaaaacataacaaaagtccaaaaggtttttcttttcctttggcattggatttacaattttcttgtttaaacctctcgcctttttgatctgagttatggcataacctgcaaaagaatccttgcagagtttagacaaaaaatctcctaattgtaaacgctccatcagcggatgtttgtacaaaatacaatcttccggtgaagctaaaatttccaaaatattaggattatttttaagcaataattctacaaaacgccctatttcgtaataaacctcatcattcgtctcattactaacctgcggaatataatctaacccaaagaatttttcttttggcagataatagacccctttaatatcggtatcggatgttggtgtatttaacccaaaagatctactacccgaaataacttcgaataggattaggttttgggattttaaattttggatggtcattttactgaaattttaaactaaactattcttaaatgtttctcttctaaaaaacaaatccaactcttcatttatcttattcccacttcctaacttactagcattctcttgattaaattgtattgtttccaataaaaaatcggttattaaagtttctttagggtgcaaatatttttcatcctgaccggcttttatattttgcaactctattattttctcttgtatattttgtggtgcaattggcaataaatcggcaaaagcaacgggtggaaaagtattcttttctataatccattttcctgctaaagctgttcttaaagcgtagaaataattctttagttttacttcttccatttcgcatacttccataaagtttttcgttgttcctaaatagtggtgtaaaaccgctattggtgaaaaacattcaacggctaaatcttgcatttgttttacaaaatcatcctcctgaaaatatacaactggcgaaaacaaccactcaatcaaagctgtattagattttgctaataactttacagatttacgtaaatcccagccagaaccatcaaggtcatcttcggtcatgaactcgataacgtccggttgttcccaaagcgacaaatagtattctggtttgtgtttgtatataaaacgaatatcataatcgctgtccggagaagcaaatccccacgcacgacttccagattctactgcaaaaagtacctctacatctttctgcttttctatttcttttaatttttctaatattttttctttcatgattgttttcaatgtaaataaacaaaaagccttcaaatcaagtacgaatacctaactttttttactacaaagacgtgtgattacattttttctcgtgatgtttgtcatttcgaccgaagggagaaatcacattagaaactccgcacagaatgtctccaatctttgtcgaatcctgtgtgtgatttctcccttcggtcgaaatgacaaaaacagttctttgtctctttacaactaaattccaaaaaagctcttagaatttcgagtcgtttcttccgccacttgagctaaagtaattcctttaaactgggcaatggtgccggccacatacggcagaaatgcaggttcgcaacggcgttcgtggtatttcttcaaaaggctgttcggcacatttttaggaagcataaagggcgcatcggtttcgatcatcaggcggtcgagcggtacgtactggatcacttcttttaaatgagcaaaacgtttggtgtcagaaatcgctccggtaaaacccagataaaaaccgttatcgagataggttttgacttcttgtaaacttcctgtaaaacaatgcaccacggctttgggcaattgcggtaaataatctttggtaatgtccataaacttggtaaaagcagctctttcgtgcaagaacaaaggtttctgtacttcaatcgccaattctagttgggctttataacaggtttcctgtacatttctgggcgaaaagtcacgatcaaaatcgagtccgcattcgccaacagccactacgtgttttagttctaatagttttcgaagtttcgaaatactttgtgcatcgaagttcttcgcatcatgcgggtgtattcccgccgttgcatacagcacacccgggtactgcctcgccatcttcgcggattcttcgctgtttcgtatgcttgtgcccgtgaggatcatctgcgatacgtcggtatcaattgcgtcttgtacgacatcgtctgtgtcgttttggaattgtttattcgttaaattaattcctatgtctatatatgtcatttttttttaaggtgctaaggttctgagaggctaaggtttcttcctctttggaaccgattatttttttttaaggggctaaggttctgagaggctaaggtgctaaggttttcttcctctttggaaccgattatttttttttaaggggctaaggttctgagaggctaaggtgctaaggttttctttctctctgttgccttaaattattattgtttttttgcccctaaggcacaaggacgctaagttttttgtttcacgcagattttacagattctagcagattcaaaatgatttttataaataatccgctaaaatctttttaaatctgcattaaaaaattctttgctacctacgcgtaaatcttagcgttctttgcggttaaaatcaccacaaagtttgtcatttcgacgtaaggagactcgagcgatagcgactgacgaggtaaatcttcgcgagaaactccgtatagaatgtcatcaatctttgtcgaatcccgcgtgtgatccttcgttcctcaggatgacataaaatgcggaaaaaacctttgcgaaccttgcgtaaatcttagcgttctttgcggttaaaattaccacaaatcgctagacacactactgtgcgcccctacactgaaaactgtgaccgagactgatcactaaaaacatgcctccacactgaaaaccgtgaccgagactgatcactaaaaacacgcttccacactgaaaaccgtgaccgagactgatcactaaaaacacgcctccacactgaaaactgcgactgcgactgaacactaaaaactgatcactgaccactaatcctccttactcccatcatccgccattctcactaatttcggtgtaaatttagccactacatctactaaatcctcctgcgctttcatcacctgatgaatgtctttataggccattggcgcctcgtccagacctgctccgataagcgtaacgccatgatcgctcaggattgatttcatctcggatggtgtaatgtttttaatcgcctgagttcggctcatttgtcttcccgctccgtgcgaagccgaattgatcgcattctcctcaccttttcctctcaccaaaaatcccggtgcggtcatacttcccggaatgattcccataacgcctttcccggccggagttgctccttttctatgcacgatgacttcttcgccgttccagatttctttccaggcaaaattatgatggttctcgactttggctaaaatcgtcgctcccaaagcgcgttccattttattatgaatgatctcgtgacaagccgaagcgtaatctcccgccaaattcatcgccatccagtattcctgacccaattgggtgttcatatccagataggctaagtttttcgctacttccggaagtttacaaacctctttggctattctagtataatgtccggcgattgtagctcccattccgcgtgaacccgaatgtgttaacaaagcgacatattttccttttggaatgttcaaaacagcatcgtcctgagcaaattccatgattccgaattccacaaagtgatttccaccacctgaagatcctaattgtgaccaggctttatcttttaagtttttcacaaacggattcctattgaaagtctcgttctccaaaaccgcatgatccgatttgtactgaccatgaaatccgtggcccgctccaaaaatagaattcttaatcaattcttttttgaatttggcttcgttttcaaagtaaaaagcttccggaatatcataaaccgacaacgccattctacacccaatatcaaccccaacaccatacggaataatggcattttttgtggccagaactccaccaatcggtaatccgtaaccttggtgcgcgtcgggcattaaggctccggcaacggtaaccggtaatttcatggctacttccatttgttttctggctccgtcttcgatatgatccagtccgtaagccgaatacgcatttggattttgatttaaagcaatgaaatcttccggtttctcgtttgatttttcgattaaagcaacagccagtttgctgaacactttatcgtctatataattctccggagtttctaagacgtttttgtaataagcgatcatttcgtctcttgtaaatccgtttcttttgctgtttatttttaaggcaatcccgattattttcccttctggaaatcctaattctaatatttctgtaccgtttatttgtgttttcattgtttctttttttaagggacataggtccagaggttcataggtgcaaaggttttttactgctgcgcagttattttaaaatcgaccaccattttcttgttggagtaacagcatttcatgaattctattaatttctgctattattggttctatttcaaattccacatttagcatcttaaaaatatgtttatcataaaaatatgctctgaaaaatgttctaaaatcatttacataacttatcggtcccacatattttggcatgaccgttccactattaaattctttcaaaaaattatctagtttctcatcaaaatgttcgataagatttcgcatatctctattttttaaaatacttgaatcactaacatcataaattttacgaagtttttctcctctaattctataatatcctttatcctttgaaggccaaaaaaatcgagaaattgctcctacattcccaatgatattttgaagtatatctaaaattgcatcgtcatttttacaatgatgaattccatttttccaaaatttatttaatgacttaacatcattcaaaattgagcgtgttttatttaataaagattctatgtagaaaacttcattaaaaggatggatttcaaattctgaatttttcatatctattaatttgtttttcaaagattcaaatagtaatgcgcaattattttgcgtagatgaatttaattctaagttttttgctcagcaaagacatatttctcgcaaaatcgaagagttttataggtgctaattgtcatttcgacgtaaggagaaatcacactagaaaccccgcaaagaatgtcatcaatctttgtcaaatcctgcatgtgatttctccttacgtcgaaatgacaaacaatgtgatcaatcattgctctctataaacctttgaacctttgcctctctgaacctctgtacctctgtacctctgtacctacaaacattaatcaattaataattgtgtcactgcagctgcgttcattgcccattgtgcggtataaacctcatcggcaaatttatcttcggtgattgttagaccttgagcttccgctttaagctgtaacaaactacctatattcaatttactgttcaatttggcaagcaaagcctgaactcctttaaagtccaaaccttgtacgacctgacctccgaaagtcatttccagccaaacgatttctcttttggctacatccaaaactccaaagaccaaacctttcgccacattctgcgtcacacgaacctgatgatccacgcaagacggatcgtaagcaactcctgttttctccgaaattttcatcgggtatttgctgttcatccaacctactatcaaatttggcgtgatactcccgttgctgtaggcattgcaggtaaaagtcacaaacttagctttggcttttgccaattcgtcgatattgatgttgatatattcggcagttccaattttattcggaatacttctgatatctccactatgctgacagcccgtagtcgtcaatcggctgaacgaacaaatatcagaacggtcttcgtaggcaatatggcagcttaaatccatatccagatgttgagccggtaaacctgcaccccactgcataaacaatcgcacttcgttgccttcaatcgggaaacgcgttcccatcaaagccaccggtaaatcctgaaccgtatcgctacgatctcctattgaaaccggaatgttaaacaattgcggatcaatgtagatagttttattggtatttttaaccgctgcgaatctttttctcatcgccaaaagacacaaatcctcaatctgatttttcatctcctctaactgtgattcgtcatacaaattcaacaatgcgtttggattcactcttttattggttcctcctaaaggttttacacttctttgtatgtttttatcaaaataatttgatgcatacatgttcagcgtaaagatcagtctagccggaactttatcgataatttcagaaaaatgagcaatggtttcatcagccccaaaccaaagcatattcgaaaataacgaacgggcaaacaaccccggacgttgctttaacaacgcaaatgttttatcggcatcaaactttaaccttgacgaatttactttcccctgccaaacgtcatatacctgattgtaaaatacatccaataaaaaattcaatttctcaaatccttttcttttgctgtattctgccaaacgcaaggcacggataaaacgaacccacattcctctttttggatgcatcgtttcgcacatggcttcaacttccatatccatattattcaaccagttggcaaccatcaaacatccttttcttgaatatttcaatttcaaatctttctgagacgccattctcgcctgcacacttgtatccaaaacagtataaaaatgctgtccatttttagcggctcttttaacaatggtttttggctcaatgatctgaagcattcccgtattcttaaaccataaatatcttaaaatatctgttggtgttttcaaaaattgcgatacttcttcttctttaccgttttcaatcaaaagatcgattacaagcattaaagtttccttcattgctacctcagtttttcgtaaaggcaagtactgcataaccatttttaagctatctgtctgagtagcatctaaagcagttttggattgcaataaggatatatagaaatcatttaaatctttttcggaccacaattccagcatttttaatttgcttccctgtcccactttttcgattttaccaaattcaaaaggagttccacaaaatggacaaccgttgtatctttctaacggaaaagtattatcaggaatgatatgtccacaggataaagttgttccgtttttagttttaaaaacatttccgaaatatgtaataatatgatccaaaacagattctccagttggaacattccattctttcaccaatggagtccagtttttatccgttcctaaaacttctctcaaaacttctaaaacctcaactttgtaagtcgggcttacgttgtttaaagcctgaagcaatgactccgaaaatgtaaatcccaattttgaaacattggctaacaaaacggatgttgttcctgataaatttttaacgtcattcgcaatcatttctgatggaataaaaatagcgttctgacgtaaactgatttttaataatgctgttgttttcatttttttaatttttaaaatttagataatggtgcttctgattctacctaaaagattttgaagtaagaagcacttgacctgaaattggagtgtaatagactaactaagctaaaatggagcgggcgaccgcgaagaagtaagttaatcttgaccctcattttattaatgatgattttaaaacttgccggactcgaaccggagtaacctattgtctgaagtaagttttaattgatcatcaatagtgaaacagatgggattcgaacccacgacccggacattagaagtgtacgaagtaagttttgattgaccttttaccgataatctcaaaactacctgctctaccgctgagctactgcttcataataattgaataaaaaggtaatggtgtaagtgtgtacgttggaaagttttctgaagtaactcaaacttgacctgttttattctttatttaatttatatgaacgtttgtttttatttctgaacaaagattttaaaaccagtgcgcagttattctgcgtagtaatttttttgtttcattttttagaaatactattcgttttatttcctgagcaaagattttaaaactactacgcaattattttgcgcagttaaaaaagaattttaaatttgagtaaatattgatttgaaaaaagtctataagtcccggagagacgttataactatagttttttcagattacaaaagtataagtcccagagggacgacatatttgtacatttttttcacatgcatttgaagagccccagcggggtgacatattctattaatgaaaggaaaataaaggtatcgctccgctggagcttttgattctctgttataatttggccataaatattcagctcttatagagcttttcattagattaaaataaaaaataccatatgaatttagaaaaaatctattctgaattactcttgaacattggctttccattaaatgaaattcagcaaaactggatggttttagaaaaggcctattctaaaaaatcaagacattatcacaatctcacgcatttaaaacaaatgatggagagttttgaggtctatcgggataaacttgaaaatccgaatgaagtattgttctccattttttatcatgatattgtttactcttcttccagaaaagacaatgaacttaaaagtgccaaattcgctttgtcaattcttcccgaaaatatcaccctaaacaaaccattcatttttgatgcgatctgtgctacacaacagcaccttcatcatcacaatgaagatattaactggttaatcgattttgacttgaagattttggcctgtgattgggaagcatatcaaatctattatgaacaaattagaaaagaataccacatttatcctgattttctctacaaacccggacgtgctaaggcgctgaaacattttctggaaaacgactttatttttcaaacggatgagtttaggaatttatatgaaaagaaagccagattgaatattgagaaagagatttccctattaacgtaaacgcgcgtaagggattgaggcggtatccttttgtgaagagaaacggaacaaaagatatagccgaaagcccgacccggagggacacgcccaaaaacacgaaccatgtcacaaaacaaaaacgccctaattcggtacaaaacgatagacaaatgtcttcaaaacaaatatcggcaatggactttagacgacttaatcgaatgctgctctgatgctttgtttgaatacgaaggtcgagccaaccccatcagcaagcgaaccattcagatggatattcagctcatgcgaagtgagaaactggggtacaatgccccaattgtagtatatgataaaaagtactataaatatgaagacgacgaattcaccataaccgatatacccctaaccgaaacagacatgaatgtgctcaccgaaactgtttcgatgttaaaacagtttaaagatttctccctctttaatgatgtatcggatattctacagcgtttggaggataaaatctacgccgaaaaatcgcataccaaacccgttatctatctcgacaaaaatgaaaaactaaaaggacttcattatctggatgagatttatcaggccatcatcaaaaaggtgaccttggttattacctacaaatcgtttaaatctcaggaagaaaccaaatttcattttcacccttttattttaaaggaattcaataaccgatggtttttggtaggaaagaaaaaaagttcacaaccgattaccaatttagccctggacagaatcattgccatagattacgatttcaacattccctatttagaagaaaactttgatgcagagctcttttataaaaacgtaattggggtaaccgttaatacaggtttacaacccaaaaagatcgaactttgggtagacgcaactaatgcaccttatgtgttaaccaaacctctgcatcacacacagcggctcattaaagaaaatgacgacaaaagtattatcgttcatttgttcatttctccaaattacgaaatggaacgtttgcttttaggatttggccacggcatcgaaattatcaaacctgaagatctgagaaatagggtaaaagctatacttcaaaaggcagtttcaagatatgaacacaaaaataccattgaattaaagccataattttttacaaaatgcagaattttatcttattttaaaaccataaaacaatttttacagcattaattttgttaaaacatcaaaaaagaatagtatatttcaattaaattttaaccgtaaacccctataaatcaaagggattttttaactaaccaaaaaattattaaaaaataatatgcatgcatagtattttttaattatatttgaaatcgatatagttacatatgaaagagaaaacaatagattatattctgcgtgctacatggcaagctgtatcaagaatgtacaatgaagaggctgctaagtacgatgccacaatggctaccgggtttgcccttttgagtatagataaggaagaaggaaccccatcgacagctttgggtccccgaatgggcatggaggccacaagtcttaccagaacattgaaatctatggaagataaaggtttgattgttcgcaaaaaaaacccaactgatggtcgtggtgttttaatttacctgaccgaatttggaaaagaaaaaagagatttatctaaaaatacggttctgaaatttaatgaaacggtaagaaaacatgtttctgatgagaaactaaaccattttatagaggtttctgaaatcataaacgaattaattcaggataaaaacatattcaatcaaacagaaaaatcagaaaatgaataaccttaattcataaggaacattcaaatcaaataaaaaacaaaatattaactatgaaacgcacaattaaaaaagtcgctgtaattggatccggaattatgggttcgggaatagcttgccattttgccaatattggtgttgaagttttactgcttgacatcgtaccccgcgagttgacagaagctgaagctaaaaaaggattaacgcttgaaagtaaagctgttcgcaaccgagtagtaaatgagcatctggcgaattcattaaaatcaaaaccatctcctatttacagtcaaaaattcgcaaaccgaattaccactggaaatacgactgatgatatggcaaaaattgccaatgttgattggattattgaagttgttgtggagcgtttggatattaaaaaactagtattcgaacaaatcgaaaaattccgtaaaccgggaactttggttacatcaaatacatctggtattccaattcattttatgagtgaaggaagaagcgaagatttccaacaacacttctgcggaactcacttttttaaccctgcgcgttacttaaagttatttgaaattattcctggtccaaaaacttcaactgaagtattggatttcttaaacgaatacggatctaaattcttaggaaaaacttcggttgttgctaaagatactccagcgtttattggaaacagaattggtatttacggaatccaaagtttattccacctggtaaaagaaatgggattaacgattgaagaagtagataaattaaccggaccggtaattggccgtccaaaatcggctactttccgtacggttgacgtggttggattggatactttggtacacgttgccaacggtatttacgaaaactgcccaacagacgaacaacacgaattgtttaaacttccggatttcatcaacaaaatgatggaaaataactggttaggaagtaaaacaggtcaaggtttctacaaaaaagtagacaaagatattctttctcttgacttagacaccttagaataccgtgctgccaaaaaagcaaattttgcgactcttgaactgacaaaaactatcgataaaccgatcaatcgttttaaagttttagtaaaaggaactgacaaagcaggagaattctaccgtaaaagtttcgccggaatgtttgcttacgtatccaacagaattcctgaaatctcagacgaattatacaaaattgacgatgccatgaaagctggttttggatgggaaaatggtccattcgaaatctgggatgctattggtgttgcaaaaggaatcgaaatcatgaaagccgaaggtttagcgcctgctgcctgggttactgaaatgttagcttccggaagcgatagtttctattctgtaaaagaaggagctactttcttctataatattccaacaaaatcacaaactaaagttcctggacaagattcattcattatcctgaacaacattcgtgaaagcaaaaaagtttggagtaatagtggcgctattatcgaagatttaggagacggaatcttaaacttagaattccagtctaaaatgaataccattggtggcgatgtacttcaggccatcaataaagccatcgacttatctgaaaaagaataccaaggtttagtgattggaaatcaggcagcgaatttctctgttggagccaatatcggaatgattttcatgatggcagtggaacaagagtacgatgaattaaacatggcgatcaaattgtttcaggacaccatgatgcgcgttcgttattcttcgattccggttattgtagcgcctcacggaatgacttttggcggtggatgcgaaatgagcttacacgctgataaagtagttgctgctgctgaaacttatatgggattagtggaatttggtgttggtgtacttcctggtggtggtggatctaaagaaatggctttaagagcttctgatttgttccgtaaaaatgacgttgaattaaacgttcttcaggagtatttcctgactatcgctatggctaaagtttcgacttccggttatgaagcttttgataccggacttttacaacacggaaaagatattatcgtagtcaacaaagaccgtcagattgcagaagctaaaaaacatgccttgttaatggctgaagcgggttatacacaacctatcagaagaacggatgtaaaagtattaggaaaacaggctcttggaatgttcttagttggaactgaccaaatgcaagctggaaaatacatttctgagcacgatagaaaaatcgcaaacaaactggcttacgtaatggctggtggtgatttatctgaagctactttagtatctgaacaatatttattagatatcgaacgtgaagctttcttgagtttatgtacagaaagaaaaactctggagcgtattcaatatatgttaactaaaggaaaaccgcttagaaattagaaaatagaacaaagataatagaatatagatttcagacttggtaaagtcaattttctatactctatcttctatactcttaaaaaatagaataaagaaaaaagaataaagattttgagacaaagtaacagtctattttctatgatctattttctataatcttaaaaacacaaaaacaaatgaaaacagcatatatagtaaaagcatacagaaccgcagttggaaaagctccaaaaggggttttcagattcaaaagacctgatgaattagcggctgaaaccattcagtttatgatggatgaactgcctgattttgacaaaaagcgcatcgatgacgttatggtaggaaatgccatgccggaagcagagcaaggtcttaacgttggacgtttaatctcgttaatgggattaaaagtagaagacgttcccggagttacagtaaaccgttattgtgcatccggattagaaactatcggaatggcaactgccaaaattcaatccggaatggcagattgtatcatcgctggtggtgcagaaagtatgagttatattccgatgggaggttacaaaccaactccggattataaagtagctgctgccggtcatgaggattactactggggaatgggtttaactgccgaagcggttgccaatcaatataaaatctccagagaagatcaggatgagtttgcttacaactctcatatgaaagcgttgaaagcacaagcagaagggaaatttgacaaacaaatcgttccaattactgttgaacagacttttatcaatgaaaatggtaaaaaagaaacaaaatcatacgttgtaaataaagacgaaggtccaagagcaggaactactaaagaagctttagcaggtttaagacccgttttcgcagcagacggaagtgtaactgccggtaactcttctcaaatgagtgacggtgctgcttttgttttaatcatgagcgaagaaatggtaaaagaattaaacctggagccaatcgcacgtttagtaaactttgcttcttctggtgttgaaccaagaatcatgggtatcggacctgtaaaagcaattccgaaagccttgaaacaagcaggattaacattaaatgatatcgaattaatcgagttgaatgaagcttttgcttctcaggctttggctgttacccgcgaattaaacatcaacccggaaatcgtaaacgtaaacggtggagctatctctttaggacacccactgggttgtacaggagctaaactttctgttcagttattcgacgaaatgaaacgcagaggtaacaaatacggaatcgtaagtatgtgtgtaggtaccggacaaggttctgcagggatttacgaagtgttgtaaaaagaaaatagaatatagaataaagagaatagatgtttttttttagagtaaagagaaaagaacaaagattataaaaagtaataaaaaacttactttacgtttgtaatttcttatcttggctcgaaaaacatgagacataattataagaacttaaaaatttggcagctcggaattacaatagccaatgaaatttcagatgtattaatagaatttccgaaacacgaaagatacgatttgagttctcagattagcagatgttcagtttctatgcctagtaatattgctgaaggttcttcaagaactgataaatctttcagtcattttttagacatttctctcggttcttcatttgaattaattacgcaactattaattgcaacacatagaaagtatataaacgaaaaacaatttaaccaattagaaattaaaatagaagaatttcaaagaatgacaatgagttttcaaaacggactgaagtaaaagtctattttctttactctatattctattttctttcataaaaaacaaaaacaaaatggcagatactatcgaaaaaaacgtgactcgtggtggtcagtttttagttaaagaaacaaaatgcgaagatatcttcacaccggaagatttttcggaagagcaattgatgatgcgtgactctgtaaaagagttcgtagacaaagaattatgggcgcataaagatcgtttcgagaagaaagattatgcttatacagaatcttctatgcgtaaagctggagaactaggacttttaggagttgctgttccggaagaatacggtggattaggaatgggatttgtttctacaatgttggtttgtgactacatttcaggagcaacgggttctttctctacagcttttggtgcacataccggaattggaactatgccaattacgctttatggttctgaagaacaaaagaaaaaatacgttcctaaattggcttcaggggaatggttcggagcttattgcctgacagagcctggagcaggatctgatgctaactcaggaaaaacgaaagccgttttatctgaagatggaaaatactactcgatcacaggtcaaaaaatgtggatttcgaatgcaggtttctgcagcgttttcatcgtttttgcccgtatcggagaggataaaaacattactggtttcatcgtagaaaatgatccgtctaacggaatttctatgaacgaagaagagcataaattaggaatccgtgcttcttctacacgtcaggttttcttcaacgatacaaaagttcctgttgaaaacatgttgtctgaaagaggaaacggtttcaaaattgcgatgaacgctttaaacgtaggtcgtattaaattagcggctgcttgtttagatgctcaacgtagagttactacaggagctgtaaaatatgctaacgaaagaattcagtttaatactccaatttcaagcttcggtgctattcgttctaaactggctgaaatggcaactaatgcttacgctggagaaagtgcttcttaccgtgccgcaaaagatatcgaagacagaatcgctgcccgtgaagcagaaggaacttctcatcaggaagctgaattgaaaggtgttgaagaatatgctatcgagtgttctatactgaaagtagctgtttctgaagacgttcaaagctgttcggatgaaggaattcagatttttggcggaatgggattctctgaagacactccaatggaaagcgcctggagagatgctcgtattgcacgtatctacgaaggaacaaatgaaattaacagaatgctttcagtgggtatgttgatcaaaaaggctatgaaaggtcatgttgatttattaggaccagctatgaaagttcaggaagaattaatgggaattccatcttttgatactcctgatttctctgaattatttgcggaagaaaaaggaatcatcgctaacctgaaaaaagttttcttaatggttgccggaagcgctgttcaaaaatacggaccggatttagattctcaccaacaattattgatggcagcttctaacatcttaatcgagatctacatggctgaaagtactattttaagaactgaaaaattagccaaaaaagaaggagaagctaaagtacaagagcaaattgcaatggcaaaattatacttgtacaaagcagtagatatcgttaacctaaatggtaaagaaggaatcatttcttttgcagaaggtgacgaacaacgtatgatgttaatgggacttaaacgtttcacaaaatacacaaacaatccaaatgtggtagccttaagagaggttattacttctaaattagttgcagaaaacgaatactgcttctaatacaaaaatagtttttagcttttaatttgtttaaacccgcactaatccgaaacagtgcgggtttatttatttatttttttgactaaatcgaaggagtgggctttcgcaatatttttgcaacgatttgcaaaatattcgttaaaattaactcttagacccctatagaatagttaaatattgatggtattactttatatttagcattctaaaaactttaaaaaacataaaatgaaacaaattaacctgtttgccctgattctattgtgcaactttaccacaagtacatttgggcaaaaaagcaaaaaaatggacatcatagcctattatacaggtgatgacaagctaattaacgaatacgagctaagtaaactaaaccaaatcatctttagtttttgccatttaaaagagggcaaactaagcgttgattcggcaaaagattctaccacgattaaacatttggtttcgctaaaagcatccaatccacaattaaaaattattctttcacttggtggctggggaggttgtgaaccttgttctgctgcattttcgacagccgaaggaagacttacttttgccaaatcggtaaaagaagtaagccattattttaaagtagacggtttagatttagattgggaatatccggcaattgagggactgccaggacatttgtttcaaccggctgacaagccaaatttcaccgaactaatcaaaattttacgttcaactttaggtaaaaaatacgaattgagctttgctgccggaggttttcaaaaagccttagacgaatcgattgactggaaaaaagtaatgcctctagtaaaccgtgtaaacattatgagttatgatttagtgaacggatactcaaaagttaccggacaccatacgcctttatacagcactaatccaaaagaagaatctacagacagagcggttgaatatttattgaaactgggaattcctgctgaaaaactagttataggaggtgctttctataccagaacctggaaaaacgtagaaaacatcaacaatggtttgtatcaggcaggtgagcatgttcagggagtttcttttaaagattatagcactttttatacagaagccaatggatggaaatacttttgggatgaaaaagccaaagcacctcactggtacaatgaaaaagaaaaaacatttgccacaggagacaatctcgcctcaataaaagcaaaagcagaatatgctaaagctaaaaacttaggcggaatcatgttttgggaattgcctctggatgccacacgtaacggaatggtccatacaatttacgacgttaaaaccgctaaataaaaaactttacatcataaaaaaaacggcagctgttcaaaaaatagctgccgttttgcttatcgtaaaaatttaaaactaaattttaactttactcttatccagttcgcctataaaaggaattgtctccagaatttcaactctgattatcgtttgtaaatacacttctaactgaatgaacttcgctgcattgatggcacctatcactttttttgcctgcgtataggtttttgagtataacttttcatatccaatatgatttcttaaagttccctttgccagctcatccgctttttcatcggtaagcgttgcataattcaccgcataatcattaatcaattgaaatttcgtttgcccgaggcctttgcgatccgcttcataactatcataaacttttgcaaatgccacagcctgactatccgataaattcatatactctttcacgagatctccttttgattttccgtaaatgatttgtaaaacatccacatcctctttaaatgatgattgagcataagaagaaaatgagacaattgccataacaagaataaggcctatttttttcatagttctggttttaaatttgtttctataaatacatccgttgtaaaaaatacccctaaggttctaaaaaagtaagactacttattctccaccgcttttggcgctctaattacaccatcataagaaatggacgccctattgttactgttgactgaaagcgttgtacttccgttattgaaaatagtgaaaagcaaattatacacatcatcttttcccctaacagtagttcttaaaatgtaactcttctttttcttttcgactttaatatcttccggtgttccttcaaattttattccgccgtctcccccataggcaacgttgaatgcacgtccaaaaaaaggcagatcacaaataattttatcgctgctaaatcttaaaaaataaatattataatccaaaataatgagccttcctccttgcggatttaatttctgcgcttcaaaatcgaactttttagaatcaatcaatgcttccgtttctttctgttgctgtaaatctttttctgcccttagctccttcttcgtcttttcctgtgcaaaaaccgaaacattcaaaaaacagcacagcaacaataaaatgaataatttagtcttcataaagtgcaaatttaaattaaaaaagaagcgtactattttctggtaaatcgcatcaatgcaatgtctcctgagataaaatgcagcgttttcccttcatctgtaatatcataggatgtaattttgggcaaagtacccataaaaagacgttccccttcctgtgcttgtggacacatctttttggttacagccattggacctgtcagatcgattttatgccccgttaccacaagtgctccgttgaaagaattacatccgttatttccggatactcttttttcaggcagattaaaattaatggttggcttagtattgggatacaaagcgtcaaaatcaacacttgaaccggagatgtaattaagctcccagcttccttcaagtttagaagcaccgtccccttttgctactttagaacaattacaggaagtgagaacaattcctaaaaaaacgaaagataaaatacttttgatcataatatttaaaattaagttaaaaataaaaccattgattttcaagtaaataaattcataattacacgaatttacgcaatattttttggttcatcagctaaagttgctttaaattccgatccatagttttagttttttttaacgatcggcactaatccatgtcagtattttatgttaattttacttaaactataataataaagactcttctatgaaaaaaataatcgtttctttcgccataattacagctttaatcattggctgtaaaaccagtacaaaatcaaatgatgccaaaaccttaagggtagctttagagccaaaaagcaaaagtacagtagcaggaacagccacttttaccgagagaaaaggaaaagtaacttttgctgcaaaaataacgggtttacagccgggagtacatgcaattcacattcatgaaaaggcagattgtagtgctgcagacggaagttcggccggaggacactggaatccaacttttaaaaaacatggaaaatggggtgttgccgagtaccacaaaggagatatcggaaactttaccgctgatgcaaatggtaacgggactataacactaactactgatgaatggtgcattggctgcggagatgaaagtaaagatatactgggaaaaggattaattgttcatcagggatctgatgatttcaccacacagcctacaggaaatgcgggcggaagagttgcctgcgccggaatcattaaataaaaaacataaaacagtaataaccactacattttcacaaaatctagtggttatttcattttaaatttacactaaaacaagaaaaagatatagctttgcagctataaattataaagttaatgatcaacccatcggcaccaggctggatagataagttttttagcgaacaaaagttttcagaagctattccttttgagactgctgagtcgttttaccataaagtcagagaaaccggttttatttacggccacatcatcgctatagattctcagattccaatccctataaaaggctggttcaaaaccgaaatctccaaagtagctttattaaatactttatatggtgttttttgtttggaaaaaagaagctctgaacctaataattttatttctgaagttttaaaattctataaggaaatgagtccggaaggttttaatatatttaaaattctgcttccaaaggacactccttccctttctttagaaaacattatagatcagcgcgttcagacgaatgacagtattatcagtaaaaacttttcgcacttagtaaccaatgcgcttttgtttattgatgtcctggctttcagacaatatttagaacacggaacaattcctgaaaaatacttaaaacgaatcgaagaaaccgttatgggtattgtggctctggctttaaaaaccaaaaccataaaatctcagcacgacgatttactgattaaactttttgaagcttccatccgatactccaaattttcaaaagttacggttgatactttagaaactttacaattggactattacaactataaactggaacactactatttgatcgatatggccggaatggctttatggagcgatggagttgtcgaaaatgaagaggcctactttttgtactctttaggatcgatgatgggaatttctgatgcttttgtaaccaaaagtattgaaaccaccaacacgttcatcactactcacaaaaagaagattccttattttaattactccaatcctgtaaaacacttttacgaccaaatgacccacagtgtggtaaagctgattgtaagaaacaaaaacagattagtgaaggaaatcattcaaagcaaagagttaatggttctgctggcttattccaccaccagagatctggatgctaaagaaaagaaaaaggtgaaaaaacaacttttagacatctgtaaaacgattccgtcactcaccatctttttactgcccggaggaagtttattattaccaattcttatcaaatttattccaactttactcccgtctgcttttaatgaaaacctggacgaaaacgaataaaaaaaatcgcccttttgaggcgatttcttttttatattatagatctaactgataaacttcatcaagctcctcatttgaagcaatattcacatttaaatcggttacaaaaccggaatttaaaccgtaaacccatccgtgaagcatcaaatcctgtccgtttttccaggctccctgaacgatagatgttttagctaaattgtaaacctgctcttttgcattgatttcaacaaaagcattgaaacgttctgtctcatcttcaattgaattcaggtacttatcgtgtagacggtattcatctttaatgtgacgaatccagttgtcgataattccaacagactgattccccatagcagctttaacaccaccacagccgtaatgtccgcaaacaataacatgttttactttcaatacatttaccgcataatctaaaacactcaacatattcatatcagagtgtactaccatattagcaatattacggtgtacaaaaacttcacccggtttagctccaataatttcatttgccggaacacgactgtctgaacatccaatccacaataatggcggtgtttgtccttttgcaagatccgcaaaataattaggatctaatgctaatgatttttcaacccactgcctgttattttcaagtaactgcttataaaactctctcattttttttgttttttgtatggtaatcccgtttgctaaaatctactaaaaaaaacttctcgtaaagttatctaattttaatacttctcacaatcaagaaataccttaattaattataatttatttaaaattctcttttaccttttctttttgaactaaagttcttttcgcaacatcataataatgctctattgatacatgattattaatgtccggtgaattctccagttcatatgctttcttgaatcctttaagctttactttaatattttcgtcaatggctcgtgtctctttaaactcacggatcaaatctaaaacatcatgggcaatatactctgtatctgcagcattgataattactttagagttttccggaatttcacttaaagtcgacttaatcgcagccttattcaaaaatgaaacttcctgtgctaaatcgatatggatgacatcaccatcttcgtattcttcttttttgaaactgtacgctcttttcagatttcctctcaatacaaaaataatactgataacaattcctaaagcaactcctttaagtaaatctgttgctacaacaaatactaaagtagcaataaacggtacgaactgatattttcctttttcccagaaatgtttgaaagttgcaggtttcgccagtttatatcctactaaaattaaaaccgttgctaaagttgccaatggtattttgtttaataatgccggaatagacaaaacactaattagcaaaagcaccccatgaataatggcggacatttttgattttgctcctgcattattattggcagatgatcttaccacaacggatgtcatcggcaaaccgcccaaaagcgaacttattacattaccaattccctgcgctctaagctcaacattggtatcggtataacgtttttgaacatccattctgtcagacgcctctatacacagcaacgtctcaatagaggcaactatcgcgattgtaattgccaccacccaaacttgcgggtttgtaaccgcagcaaaattgggcaaaattatgattgatttaaactcatcaaaagatttcggaaccggcaaagaaactaagtgctcatttgcaattgccagtgaacttcctgttgaagtaaaaaactcatttaaaattattccgataataacggcaacaagtgctcccggaattaatttcattctttttaagaagggaactttctcccacgaaattaaaatcacgaaagaaacaagtgaaaccacaaccgctcctaagtgtatgtgatttaaaacatcaaatagaaaagaaaaagagttgcttccgtcattttgaataaatgcctgatctccttcaaaatcggcatcgtaaccaaaagcatggggtaattgtttcagaataataataattccgataccggccaacattccttcaataacgttggtaggaaaataattggagatacttccggcctttaaaaatcctaatgctaattgaattaatccagcaataaaaacagacattaaaaacacatcgaaagcacctaaatctgtaatagcggttaaaatgatagcggtcagtccagccgctggtccggagacactaatatgagactggcttaagtaacctaccacaatacctccaacaacacctgcgataattcccgaaaataaaggtgctccggaagccattgcaatacctaaacacaatggaagagctaccaagaaaaccactaaacctgaagcaaaatcagatttaaggttggcaaaaagattgattttttttgtcatagcacaatactaaaaaaattattcattaaagacttactgcaattatcaaaatgcagttcaattcaaaataatcggaagtattatgccaagttaggaggtggagcaaaaatgctcggagaaatattgtctaattttacaatattctcagacacaatggtctttttttcaatataaactggcataacaacttcatgttgaagtattgccggataaacagcagccttaagttctttatgtgaatgttcctcttcagaaaaactgaaaaatatcgacgcatcgttgcttttcttcattaccgtcacaatagttggggtagataagaaggcaataaagatgaataataatatgcgagcgactaatttcattggaacaaaaatagtgttaaacagctaaaatcaaagcgagaggccaaaaaatttaaacaaatttaacaatcataaaaaacagaatggccaaacccgaccattccgctatagtaatcactttagaaacaacacattaaagctcttcttcaagccatgcattcatcatccaaattgttttttcctgctctgcaatgaagtcactcatcatcgaatttgtcccttcatcgttaatttcatccgattgttttaaaattcctctttcgattttcaataaatccgttaaagagctcacaattaaatgaaccgctttttcatcatttgaaatgttctttccgacagctaatttgttatttttaatgtaatcttcaaaagtatgtaaaggagttccgccgatagttaaaaccctttctgcaatcaaatcaattttcaattgggaatctgtgtacaattcttcaaactttacatgcaaatcaaaaaaacgtttcccacgaatattccaatgcaacccccttaaattctggtaatatacctgaaaatttgacaacagaacatttaattctttcactaacaattctgactcctttaccggtaaacctaaaatatttgttttcatagttctcattttataatgtgattactacaaatttaaaataagttctctgaaaataatataaaaaaaaattatatttccttatttttgcatcaaaaattactatcaagatgactataactcaattgcaatatgtattagccgttgccgagcataaaaattttacccttgctgccgaaaaatgtttcgttacccagcctacactgagtatgcagattcaaaagatcgaggaagaacttagcattcaaatttttgacagaagtaaaaaacccattcaacttacagatattggtcagaaaattgtaaaccaggccaagaatattgtaaatgaagctgatcgtattaaggatattgtagaacagcaaaaaggttttatcggaggagaattccgtctgggaattattccaaccattatgccaacgcttttaccaatgtttctaaacaatttcatcaagaaatacccaaaagtaaaactcttaatcgaagagcttaacacggatgaaattatcctgaagttaaaaaatggtcatttggatgctgctattgccgcaactccgcttgaagatgaaaaaataaaagaaatcgttttgtactttgaaccttttgtggcttatataccggaacatcatgccagttttcaaaaagaggaaattgaagttgccgacttaaacatcaacgaaatcctgttgcttcaggacggacattgttttagagacggaattttaaatttgtgtaaaaatgccagcgaccttgatcagaataattttcagatacaaagcggaagttttgagaccctgataaaattagccgacgaagggttgggcacaacactacttccgtacttgcacaccttagacttaaaagattccgacaaacagaaactgcgtaactttaaggaaccaaaacctgctcgtgaggtaagcttgatttacccgaagagcgaattaaaaatacaaatcattgacgccctaagatctacaattgcaggagttgttaaaggagcaattgtttttcagaacgttcagatcatcagtccgctacaacaaaagaaataaaaataaaaaaggagccaatttggctccttttcttttatactttaattagtagtagactttgctttaattctggtttttcaataatgaaatttaataaccattcttgtaattgttccatttcgtacggtaacagtgttttgatagctttttctaattctttgcagaaaagtatcgggtcgaaactcactctctcaagtattgatttcgtgtaatcaaacatcatttttgacataataaaataagattttttggggttatctatatttttaaactcgcaacaaatttaaacaaatatcaatcactagtattgattttaacttatttttttaaaaactttagcagcgaatacgatttcttaatgcatataaatcaatatagaatcattctaaacaactcatttaaacctttttaaaggctctaaacatttctctttttccgggaggtcctgccaatttttcaactgtaaaaccaacctctatcatacttcttttaacaactccgcgagcggcatacgttaccaaaactccatttggctttaaactttggtacatttttcgaaaaatttcagtactccatagctccggctgcacccgatatccaaaggcatcaaagtaaatcaaatcaaaaatttcaaaatcatcaatttcatcaaaaaattgtttccttttggttaacatgaaatcggcacggataaccactttctgattccactcgcattcgtgcattttttcgaaaacatccttataattgtctgcctccaattcagcaacataattcatttcaagtacctctttcgcatcaaccggataagcttctactcccacataatcaatttgctgctgttttgacctggattccaaaaaagtaataaacgcattcaaccccgttccgaaacctatttcaagaatactcaccggagcagcatcaaatagggaaagaccattttttataaatacatgtttggcttcctgaatcgctccgtgtttggaatggtaagactcattccattcctgcaaatgaattgtcgttgagccatctagcgttttaattatttctcttttcaccttatttcagaattagccctctttttctattgataaatagggcattttaagtgccaaatttagtcaaaacaaatgcgtaaagccttaaaaaacggtttgtttttcataaattctttataaaaatgtcttaattttttcactttattataagatatataaatctcagttaaagggcgtaaataatgcagttttactaagcaaattatatatttttacttaattttgcattgagaaaaatctatcactcaccaaatcatagctttagattttctttattattaatgctaattacataaaaaaaactttacatattaattatgagtacaactcaaaccaacaaaattgaaatcagaaaagcaacttcgtcaaaaataagcggagtagactttcaaaatttaagctttggttctgtttttacagaccatttattcgagtgtgattttaaaaatggagaatggcaaaatcctgtcattaagccttatgctccaattttaatggatccttcttcaaaagtcttccactacggacaagctatttttgaaggaatgaaagcttataaagatgacaataatgatgtttggttgttcagaccggatgaaaacttcaaacgttttaacaattcagcagttcgtatggctatgccggaagttcctgaagctgtttttatggacggtttgaacgaattattgaaaattgatcaggaatggattcaaaaaggaaacggaagcagtatgtacatccgtccttttatgattgcaaccggtgctggtgttgtagcaaatccttctgacgaatataaattcatgattttactttctcctgcacagtcttattacgcaggtgaagtgaaagtaattatcgcagaacattacagtagagccgcaaacggaggaattggagctgctaaagctgccggaaactatgcagcacaattttacccaaccaatctggcaaacaaagatggtttccaacaggtaatctggacagatgatgccacacatactaaattggaagaagccggaactatgaacgttttcttcagaatcaatgatactttattaacagctccaacaagcgagagaatcttagacggtattaccagaaaaagtttaatcgctatggcagaaaaagaaggtcttaaagttgaagttcgccctgttattgtatcagaattggtagaagcagctaaaaacggatctttaaaagaaatcttcggagcaggaactgccgctgtagtaagtgtaattaaaggtttctcttatcaggatgtctattacgaaatggcgcctcttgagaattcttacgcttctctattaaaagaaaaactaacaagtcttcaaaacaaactttctgaagatacttttggctggactgtaaaagtacagtaatccaaaaatataaattcatacaaacccgacaagttttaaaaaacctgtcgggtttgttattttataccactcttctcactgataagctacgcccaaaatcgaaacaacagattaaaaaattaaatctgtataaatctgcgtgaaaaaaatctcaacacatagaaacatagatttaactgaatatttcaaaaagaaacctgtttcttacacatagctatgtgaattttaaaaaagtaaaacgtctttttcccacattaaaagctatgtttctatgtgttaaaacaattttctttacaaaagtttagaaaaatcaggtttaaaataattcggacctttcatcacttttccgtcttctctgtaaattgggttcccgtcttctcctaatttactcatattactgcgttgaatctcatcaaaaacagcttcgattttgtcctgcaaaccgtgctcgataatagttccacacaaaatatacatcatgtctcccaaagcatcagcaatttcaactaaatcgttgttctgaaccgcctccagatattcttcgttttcctccttcattaaattataacgaagcagcttttttgtctctcccaaatcagcaatcggttccagactatgacctattctaaaagcagtatgaaactcagtcaccgcatcaagttgtttcttcatgatattattttgattaaatgaaataccaaattagcaacaattcgtatacaattctctaaatttgccaaaaataatttttaactatgtttagtcaaggacaattaatattcggactctgtttttttattgcattcgtaatcgtaatgatattcgcttatcgaaaagatctcgctttacacaaggttttttacaaaggcaattataaagtattactcgtatttttactttttattgccattttatttgtaattaaatttttcttcaaaagatagaaccgtaaagaaagctttcgatttcaaatacaatcattttcagtacgttttatttgattttctcttccgataatggcataaaatgtacttttagcaaagtgttattagtgcgactagtaataaatttataactttacgactccaaataaaccattccaatgaagattcttaaatatctattccttctattattactaagccttgttgcccttaccgtttttgttgccacacaaaaagggatcttttctgtagaaagaagcaaagtgatcaattcaccaaaagctacggtatacaattatcttaatgattttagaaattatgaagattttgaatcctggtctgttgaagatcctacgatgaaaatgacatttcctaacaaaacggtcggaaatggggcttctttttattggacaggatctgaaggaaatggaaacgcaatcactctaaaaacaaaggacggagaaagcatacaacaaaaaatgaagtatgacggaaccgaagctgatgtaaactggacttttaaagatacgttagccggaaaaacaaaagtaacctggaaagcatccggaacgatgagttttttatttaaagtttacgccgctctaaacggaggctcggacaaagtaattggaactatctacgaaaaaagtcttgccaatattgacaaaaacttagattacgaaaccaaaacatacgctataaaagttaacggattagtaagaaagactgaaactccttacatcagacaaaccttcacgagtgaaattggaaaagttggtaaaaatgccaaaatcgtcattccgaaactgatcgaatttagcaaaaacaatgggttagctacgaatggaaaaccatttatcatttaccacacttacgacattacaacaggactggctaaaatctcaatctgtttaccaaccagccgagaaatcgtaactacttctggaagcgatatttcaggaggaaaattaaacggatttgaagccgtaaaaaccactttaaaaggcgattattcgcaccttaacgaagcctttaaaaaaacaactgctttcatcaacaacgaaaaaatcacacctgatttaagctggtcacatcttgaaatcctagccatgagcaaactggatgtaaaaagcccgtctaagttaatgactgaaatttactatccaacaaaacctaaagtagttccggtagctaaaattcctgtttacaggcctgccactaccgatccgacagtagcaaaacctgctgaaacgcctaaaacgcctacagaagaagaacagtcagaattctaaaataatcgaggttaattaaaccttttgttcaaaattcattctaacaccataaataacggaatttggcagacgagaaggaatttattcaactattattaaatcctgcaacgcaaaataccgcgtttcaaaagctcgtatctgattatcaaaaaccgctgtattcccatattcgaaacattgttctgaatcacgacgatacagatgatgttttacagaatacttttgtaaaagtctttcagtatttaaaaaacttcaagggagaaagcaagcttttttcctggatgtatcgaattgcaaccaacgaagctttgacctttttaagtcaaaaagctaaactgaacggaataacttctgaagcactacaaaataaagccatcgacaatttaaaggccgatgtttattttgaaggagacgaaattcagatcaaacttcaaaaagcgattgtaaccttaccggaaaaacagcaattggtttttaaaatgaaatattttgaagaattaaaatacgaagaaatcgctgaaattctgggaacttcagtcggcgctttgaaggcatcctatcatcacgcagtaaaaaaaattgaaatatatgttacctcaaattaaaccttttgtaacaacaactgtcttatagctactatgaaaacatttaaattagaaaacgaaccgaaaataaaaaccgggtttaaaactccggagaattattttgatgctttttcaacaaaggttttacagcaaataaacgaagagaaagaagtaaaagtaataccgctttacaagcgtaaaaaaacactttcgattgcggctgccgcagttgtttttgcagctttactgattcctgttatcaaccattacaatacatccaaagatcttgacgaggatactctggaaacctacttatcctatcagtccaacttaaatcaatacgatttgattcgtgaactggacacaaaagacattgataaacttggtaaaaatgttgctcttgaacaggaaactcttgaagacatcttagctaccaaccctaatattgaaaatttaatttcagaataaaactaaaatttcaaaagatgaaaattaaaaatatacttccgatacttctattctttattacattctccttttatgcacagaatgacaaaacagacgaaaagcgggaaaagattaaagcttataaagtttcttttttaacaacagaactggagctcacctcgacagaagccgagaaattctggcccatttacaatacatacgatgacaaacaatatgaattgcgtcacgaaaaaatgaaaatgtatttgcgcaaactagatgacgataacattagtaccatgtctgaaaaagaagcagcttcactcttgtcacaaatggaaagcgcagacaaagaattatataccctgagagacaaatacaacagcaacttaaagaagatcctttctgctaagaaaatcttaaagcttaaaaaatcagaagacgactttaaccgtaaattactaaaacaatacagggacaaagccaataaaagctaatcctctatcaaacaacagcaacaagaaccctaaaaaataatacttactttattattttatttagggttcttgttattttaaacaattagcataagtggcaaaagctaaacataccctttctttactagtctaccaaaggaaaaaaactttatagaacagtaaaactaggctgataactggaggttctaaaaaaaaacaactcttgtgctcctactccattcgttttctttagtgtaaaaataattccatacctccctcctactacaacaccagctggtactctaacggaaaaacgactgtactcatcgattattacaccagaatcagctacaacagacggtaaactagggcttataaatgtaacttcataaatatccatggaacctggtctaatgttctccttataaggattgttattcgccgagaatgttattgttgttccaacctgaccctgactcggccaaaaagaactaaaaattacttcatcatcattcatctcttttatattgttctttaaagacttactataccatgataacataagtcaattattattactattcaagcattacattttacaatattgtttgttaaaaatttggttatctaataaactgggagattaaagctgttctgacaatatgaacaaactttttttccttgtgccaaaaaacaagaaatgcaaacgaaaagtatatcatccattacttcatttagtactattctaacttattattaaaaccatattcaaaaacaatattctttatacaacggtgaaaaaaaaattatgaggagaggttctaaacaaaagcggtacacccgctcctgtggtctttaccagggtaaaaacaataacataccgcactcccgcaaataaacccggaggaactacaacagaaaaacgactataacctacagcatccaatatcaaagctgaatgagtaacaacaacaacgtatggcagcccgatagttataaaccgcacatcaacaatggtcaaagaccccgggcgaatattctctttataagggttttcatcggccgaaagcacaactgttgttccaatctggccctgaagaggccaaatcgaagtaaaaattacatcatcatccatggtattacagtgctgttttcccaagactttctacaaatactataagcctttcattactagtattcaaacctacaatttataaccttgttagcttgaaaatttggttctctcttaagttcgggagattaaagttgctttggatggatgtacaaacatacttttttctttcagaataaaaaaataaatcataaaaaaaaccttacaattcaacaactgtaaggctacctctttattccttagaccggctttctactacaaacgtaccttatttataaaaacgatcatgcgtattttatcgaaaattcaatcgtaccaatttattataaccggcagcaattgccgtatttctattcaaaaaacgaatggtaaacaattttgtatccgttgataattgcatccagttctctccaccattttgcgaatactggattccttcagaacctacacaaataatttctttaccatttccacccggaacgtattgcacacacgaagcatatccaaatcccataccctgcccaattagctgccaggtttttcctccgtcagtagtaaaggctttattatcccttttttgttccggaaattcataatcaccaccagcgataaatccgtgttttgaatcgtaaaaatcggctgtaaaaataccggtcattgtttttccctgtacaattggtgtttcaactgctttccaggttcttcctttgtccggcgaataaaaaacacgtgccttttttccccctgaaaccagccaggtatcatttccttttattactatattagaattactggctgcaaaagcggcttcaccctctgcattggttggtaatttatccgataaaattttcgtccaggtctcgccaccgtcacgcgtaacgataatagaaaaagtatcttctgtaggatcgccaatcgcaattccttctttatcgttccaaaactgcatactatcgtaaaacaccttcgaatttacttctttgtatactaattttactttctgagtttttttagacacctgataaagcaatgcaggatttcctacactcaacaaaaaaatattgtttgcattctgagcaatacttctaaattccagattcaaagtatcacggtaaatatggtcttcaaatttttcttttttattcaaatcataaaacccaaaacgggagttatcagctccataccaaattttatttttatcgattgagatcgctctgatgctaattttatcctgaaacaaagtatctatctgaattgatgtaaaacccgtgttaaaaatcccattaccattatgattcaaggttttaaaagacattaacaaaataaaagcaccaaaaaagaatattacttttctcataaaattagttttttagcgctaaaatacaattatttataacacttgaaataagtttcgcttttttttctggcacagtaattggatacctcaaaatagtaatcataatacgatttaaaaatgaaaacgaaactactttttatagccctcctggcaataggcttgagttctgtacccgtacaaagccaaactaccgtttatgcaaaaaattcagatataagcgataacctagatttaagagctgttgcttctatcttcggagaatcggctaatctacaggattttgaaagacgtttaaatgactcgaaatatcaaatttcaaatcttgatttaaacgatgacaaccaggtggattatttacgtgtaatcgaatctgtagaaaacagaactcacgtagtaattattcaggcggttttagatcgtgatgtttttcaggacatcgctacaatcgatgtagaaagagacaattacaacagggtgaatgtacaaattgttgggaacagctacttgtatggtgccaactatatttacgagcctgtttacaatgtagctccagtaatttacacttcgttttgggtaaccaattacagaccgtattactctagctggagttggaattactatcctagatattactatgcctggagaccttacccaatttacagatacagaaacaacatcaatctttgtattaatgtgaacaatagctacaactatgtaaatacaagaagaagttacagagctccggttatctatgaaacaagacgcacgtacggttacgaaaccagacgtcctgattatagttttgcgcaaagaaattcgaatgttactaacagatatgatttagatcaaagacgtgttactaccagagattatggaagaaatcaaaatacatacacgacaaacagatccaattcggatagagtatctactacagacaacagaacctcaaccagaaattatggagagaaccgaacaacatctgacagaaattacactacaaacagaacctcttctaacaacagagataattcaggcataagcacaaatcctgtaagagttgaaaatacaggcagaagagattatggtcaaaacaattcgaatgtttccagaggaaattcgcaaaactatggaactacagaaagggtttcgactccttcaagaaatgagtcttccagaagttattcagaaaacagaggaaattcagagagacagagttcgcaaaacacacaacgttccgaatctccaagagcaagtcaggaatccagaagcagtgagccacaaagagagagtggttccagcggaagaagttacggtggtagacgaatttaatccccagtttccaatcttatataaaatgaaaagcacaatttaacgattgtgcttttttttatctttttagttataattgaggttagtttattataaaacgctaaatttgcaaccgtcttttataaaaatatacatgagcgcatcgcataaaaacttacatagtaagttgtctatagggggtttactgataacattaggaattatttatggagatattggtacttctccattgtatgtaatgaaagccattcttggcgattacgccattaattctgatatcgttcttggtggaatttcatgcgttttctggactttgacgcttcagactacaataaaatatgtactgatcacgttaagtgccgacaatcatggtgaaggcgggatttttgccttatatgcactggttaaaaagactaaaattcaatggctcattgtccccgcaattattggaggaagtgccttattagctgatggaattataacccctccaatttctatttcttcggctgtagagggaatccgggcattttatccgactatgcaaacggagactattgtttatattgttatcgcaattttattcattcttttcaccatacaacaatttggaaccaaactagttggaaagttctttgctccaatgatgctgatctggtttgcaatgttgggaactctgggaacaattcaaattctaaaatttcctgaagtaattaaagcggtaaatccgtattatgcttatcatttactatccattcatcctgacggtttctttgtacttggtttcgtgtttttatgtacaacgggtgccgaagctttgtactctgatatgggacattgcggaagaaaaaatatcagaattagctgggtatttgtaaaaaccactttggttttaaactatttcggacaggctgcttacttaatccatcatgaaggaagtacactgcaacaactgggtggagaaaatggaaatcccttttatttgattatgccacactggttccttccattcggaattgtggtagctactttggcagcggtaattgcttctcaggcacttataagcggatcatttactttgatcaacgaggctatgcgactgaacttctggccaaaagttaaaattaaataccctaccgaagtaaaaggacagttatatattccatcgatcaactggttattgttttttggttgtgttggaattgttttacactttgagaaatcaggaaatatggagcatgcctatggtcttgccattattctgtgtatgatcatgacaaccattttactgaattactatctcatcatgaaacgtgtaaaattgtacctgatggtgccgttaatcactatctatttactgattgagtttagtttcctgattgctaacattactaaatttgccgaaggcggttacgtaactttaattattgcgattgccttaatctctatcatgacaatatggtacctggctaagaaaatcaacaaaagctacaccaaaatcatcaaaattgatgactataaaaaggtattgatggaactaagcgaagacttatcgataccaaaatacgctactcatctggtttatatgactaacgctaatcgtgttgatgaattagaggaaaaagtaatctactctattctacaaaagcgtccaaaaagagctgatatttactggtttgtacacgtaaacattttgacggaaccttacaaaacacaatacaaagttaccgaaatcgctaaggacgacatttacagaatcgattttaatttaggattcagagagcctacaaaaatcaatttaatgtttagagaagtaattcgcgatatggtaaaacgtggcgaagtagacatcaccagccgttacgagtctttgaacaaaaacaatattattggagactttaaatttgttttatcagagaaattcttatctaacgacaacgatctaagatggcatgaaaacattatcatgagttcttatttcttcattaaaaaactgagtttatctgaagaaagagcttttggtttagacagtagctccgtaaaaattgagaaattcccgatggtgcttcacgctcctgaaaatattggactgacacgtattacgaaataaatcattccaaaacatcattaagaaacactcttttaaactttattagagtgttttttcttttaaaaagaagttaaatcaacaatcaaaattaaaaatttaactttcaatcaattaatagtacctttgcaactcaaataattaaaatgagattacacagaaatttagtttatactaccatcgattctttaaatgctattttcaatgaaggagaatatgcagacaaagtggtagccagagccttaaaaaaagacaaacgttggggaagttccgacaggaagtttgttgctgaaacgatatacgaaattgttcgctggaagcgactatatgcagaaattgcagaagtaaaagaaccatacgacagagataacttatggagaatgtttgcggtttgggcagttttgagaggatatcctattccggattggagacaattggaaggaactcctgagagaaaaataaaaggccgtttcgatgagctttctaaagttagagctctaaaagaatctattccggactggatggatgaattaggagtaaaagaattaggagagaaagtttgggcaaaagaaattgctgctcaaaatcagccggctaaagttatcttaagaaccaatacgcttaaaggtaccaaggaaaacttgagaaacacgttgatggatttaaatattgaaacggaatatttaaaagatcagcctgaagctttagttttaaaagaaagagccaacgtattcttaacagacgcttttaaacaaggactttttgaagttcaggatgccaactcacaattagtagccggttttctggatgtaaaacccggaatgcgcgtggtagatacctgtgcaggagcgggaggaaaaacattgcacattgcttctttaatggaaaacaaagggcagttaattgcaatggatttgtacgaaagcaaactgaaacaattgaaattaagagccaaaagaaatggtgcttttaatatcgaataccgtattattgatactacaaaagtgatcaaaaaattacatgaaaaagcagaccgtgttttaatcgatgcgccttgtagtggtttgggagttttaaaacgaaatcctgactctaaatggaaactgcagcctgaatttattgataacattcgaaaagtacaggcagaagttctggaaagctattcgaaaattgtgaaaccgggtggaaaattggtctatgccacttgctccgttttaccatcggaaaatcaggaacaggtagaaaaattcttaaagacagaaatcggaaagcaatttacttttattaaagaccgcaaaatactagcgtcagaatctggatttgatggattctatatggctttattggaacgaaaagtaactaattaatttttttcacattccaaaaaataaaatcccaaattccaaaagctactgttggaatttggatttttttctattgtttaagactggtcaattggacacatatctggtgaaatcaaacaaaatgatggaatattgccacatgttggcggttgtgttaactgcttagcacatcgcaattgatagccatttaaataataaataaaatcaccgcctttaatttgctttaattcgcttttacttaattgctcaacatttgttagatttaagataaatttcataattattaggttttaaagttaataccttataaatatagccaatttttcttactttcagcaaagtatttttttacaccaaactaggcttacgcaacagttttccgttctcattttctttgaatttcggaacaaaaacaatttcctttggcttttcgtatttacctaatacatcaaaaaaatcagaagcaaactcttgtttttctccttcaatcaccaaaattagtttttctcctaaagtagtatccggaactccggttacaaaaaacctgctgtttatcttccctatcagtttactttcgatttgctccggaattaactttactcctccactattcactacattgtcaattcttcctaaaaatacaaactgattttcattaaccagctccaccaggtcatttgtaacgataggctcattagaaacagaagccagatgaattaccaaacagtcacgatcatccttgtcgattttcacatttggaagaatcgagaattccttttctcccactcttttggcagcgatgtgtgtaatggtttccgtcatcccataggtctcataaatctcggtctttagcggaagtaattgttcttcaagcgcactatcgatcttagcaccaccgataatgagtttcttcacatttttcaattcttcaacagaattttgaacctgtaaaggaaccatggcaacaaaatcatacttagttttgtttaaagccaaaggggccgtgcttggcgaaacgacatcaatatccaaccccaaaatcaggcttcgaaccaacatcatttttccggctataaattgcacaggcaaacaaagcagtgctttatctccgggcttcaatccgaaaaaatcacctgttgccaaagcggactgaatcatcgcctgtttttcgagtcgtactaattttggaagtccggtcgtgccagaagttgtcatttcaataaactctttcttatcgaaccaatccagcaaaaactcaccaatagctttttcatatacatctccttctttgatgtaactgtaacctatgcggcataaatctttcccatttaaatgataaccatttaacttaaagtaattatggacatttttatgtgttaattttgacatgactgtgtgttttaatttaaagattttacaacatttatttcccccgttaatttttctttccagttactccaattgtacttcttactaaaaataaaaagcagaacaggataaactacaactaccggtaatagcacatctacaccggccgaaggctctgatatatcaataaaaagtgaatgcgtttgaaaaaccgaccaatcggacgttaccaacaaagctcctactaaattattagcagcatgaaaacccaatgccagttccattccctcatccattaaggtaatcactccgagaaacaaaccggttccgatatagtacaccatcacgatataccccatctttaccacttcaggattaaagacgtgcatcgaaccaaatataaccgaagtcatcagtaaaggaaaccacctgtttcgtgctaaattagcaaatccctgcataagataccctctaaagacatattcttcggtagaggtttgtatcggtattaacaccgttccgattaccactaaaattaaaaaaggtatccatttaaaattccacacgaaactctcgggagaactaaaatacaataccacaaaactcaaaacagagaacaaagaccataataaaaaagaaaaaccaactcgtctccaatctacttctgcccttgaagtagtgacggataaaagagtctgacggtgcatatatttcaccacataataaatccccacaaaagcaaaagcaaaggaaatcatcaccagaaacaaggtcaaattgggttcaaacattttcataaccgtcgcatcattagaaggaaaccccttgccggaaatccaactcttataaaacactgcaagagaaaaaggaatctgaccaataaaagatgctataataattacaacggaccctaaaagatacaaccagaacttattatgaggtttaattccttgttctaaaaacatattgataataatttaaaaaatgagaattcgatttaataactaaatcttatttttggcactgctaaaatacctatttcggtttaattatcttacaacattctaaatataacaaaatgatacaaatttatcacaacccacgttgcggaaaatcaagaaattgcctggcttttattgaaaacacaaaacaggaatatcaaattatcccttatctgaccgaaacgccgaactttaatgatttaaaaaaacttcttgaaaaactaaaccttaaaccgctgcaattgattagaattaaggaaaaaatctggattgaaaattacaaaggaaaagaactgaccgatgatcagattattgaagctatggccgaaaatcctattttgatcgaacgtccgattgttataaaagatgacaaagcaatcattggcagagatccggatttagtggcttcttttttagatcaattataaagaaccgtattaacaaatttttgtgatttttctctttaaaccaaaagttacatttgccgtctaaagaacaaaagaaaccaaaaatcacaatgaagaaaatcaaatttgctgtattgcttgtatgcctatttacaagtttgtacaactatgcacaacaggcacctcctgccagaaacaaggtaaaagttaccgggaaagttctcgaaaaagtaagcaaacaacctcttgagtacgctactatttcgatcacagccccaaatgacaccaaagttatagctggcggaatcaccaatccaaaaggagagtttgatgtggctattgccccgggtacttacgatataaaagttgaatttatttcgtttaaacctacttttattaaaggaaaaacaatttccggagacactgctttaggtgtcgtaagtttatccgaagacgctgcgcaattaagtgaagttgtcgttcgtgccgaaaaatcaagtgtcgaaataaaactggacaaaaaagtttacaatgttggacaggatatgatggtcaaaggcggaacagtaagtgatgttttagacaatgttccttctgtttctgttgattctgaaggaaatgtaagcttacgaggcagtgacaatatccgaattttaattgacggacgtccttcaaatgcgatcaatgtagctgaggctttacgtcagcttcctgcagatgctatcgacaaagtagaagtaattactaatccatcagcacgttatgatgcagagggaggatcaggaatcatcaatatcattcttaaaaaaggaaaaaatcaggggttcaacggaacttttattgcttcaacaggacttcctgaaacttatggtttgagtgccaacctaaattataaaaccgaaaaactaaactatttcaccactgcaggttacaactacagaaccaatgaaggtatgggtttaaccaatacttcttattataatgccgatggatctccaaaaggttatttagatgaagatcgtgataccaaaagaatccgaaacggttttaatgccagagcgggtatggaatggacagttgctcctaacaccttctggacaaatgccattaattatcaaaagaactcgggtgaggataaagattatattaactacaataattttgatgccgctcatgcttttacaggaactaccaatcgtttcaataatgccgataccaaaagtgaaaacgtagaatttacttcgaacttaatcaaaaatttcaacgataaaggacacaaactgactgccgatttatcggtttccagaaatacagacgatagcgacgggcttattaccgctctacctacttctaataccacattgaatgatcaggtgcaaaaacaaatactacttcaggcagattatgtacttccactaggaaaaggaagtcagtttgaggcagggtacaaaggaagttttggagatttaaacaacgagtacaacgttacaaatcttatcaatggaaactatgttatagatccaaaaaaatcaaatactttagaatacaaagagaacatcaatgcactttatgcacagtacggactgaaagtcaataaattctcttatttatttggtttacgttgggaagacacgaatattcaagtaaacttattagacaatagtatttttaacaccaaaaagtacaacaacttgtttccaagtgcttttgttagttatgaaatttcagatcagagtaacttcactgccagttatagtaaacgtttatccagaccgagaggacgtttcatgaatccggctcttaattacgccagtaacattaacattttccagggtaatcctgacttagatccatcattaaccgataaatttgatgtaggatatatcaaaagatgggaaaaagtgacctttagttcttctgcttatttcgaaaatacaaaagatgttttcagctttgtcagaactccaaatggagataaagtagacggaattcctgttattttaagccgtcctatcaacttaggaaaagagcaaaaatatggtttcgaattcaccttcaattacagtccgtataaatggtggaaaataaacagtaacttcaacctttacaatgtaaaaacaaccggagagaacacgtatacagacactaataatcaagtgattgtacaaaatctgaacaatcaggccaacacctggtttgccagaatcagctcaaaagttacattgccatataaaattgactggcagttaagtggtacctacaatggcgcacaaaaaacagcacagggtaagattctagaccaatttggaatgaataccgctttcagtaaagatgtattgaaagacaaagccacaattgcgtttaatataagcgacatttttaactcaagaatcatgagatcgtatacttaccttcaaaatgacaccactctagaaagtcaaacatcttacggcgaaatgcaattccgtaaacgtcaattcaatctatcgtttacgtaccgtttcaacaaaccaaaaagtgacagagaaaaaccgggcgcacctaaaaatgacggtgacggcggaggagaatttcctggataatctcacttaaaatccaaactaaaaaatccaaattccaattaagttttacaaaattggaatttggattttttttgattttggaatttgaatattgcttattaaaatttcattttttagcataaaaaaaggactcgcaaaacgagtcctttttattgaaatcaactaaaatttaagctgattgttcttgctttttctttgctcttttctctttgaacatttcccagctagcacccgtaacccaataagatacgaaaccaactaagaaaaacatcaaccaaaaccctatagttagtatggtcaagaaaagtaaaaaacctaagtactgtgaaaattcaaacatgttttccggaatttttgaatgtaaggacaaatgtaagccttatatttttcgttaccaataaaatccaaatcaattttctggaaataacatttatgcttatatttatactcattttaaataagctttttttcttatggataaccgccattttactgaacaatctcatgcacaagaacatgagaatcttcagaagctaattcctgctgtccgctgtatcttttgtcccgaaccccggtacaaaaggatgccgctcccatcagggctagtccattccttttcataagaaatttcagttttcagcaaacattttacattttacagataactttttacactttacaaataactttttacatacaacataatgaaatacagaatagaaaaagacacgatgggtgaagttcaggttccggcagataagtactggggagcacaaacggaacgttccagaaacaacttcaaaattggtgcagcgggatctatgccacaggaaatcattgaaggctttgcttatcttaaaaaagcagctgcttatgccaattacgatctgggcgttttaccaatcgaaaaaagagatgccatagcagccgtttgtgacgaaattcttgaaggaaaactagacgatcaatttcctcttgtcatctggcaaactggttcgggaacacaaagcaatatgaatgtgaatgaagtaattgccaatcgcgcacaagtactgaaaggatttaacattggagaaggcgaacaatttataaaagcaaacgacgacgtcaataaatcacagtcttctaacgatacttttccaaccggaatgcatattgctgcttacaagatgattgttgaaaccaccattccgggagttgaaaaactacacgctactttggtaaaaaaagcaaccgaatttaaggatgtggtaaaaatcggtcgtacacatcttatggatgctacccccctaactcttgggcaggaaatttcaggttacgccgctcaattgtcttttggattaaaagccctgaaaaacaccttagcgcatttatctgaaatcgctttaggcggtacagcagttggtaccggattgaacactccaaaaggatatgatgtaaaagtagctgaatatattgcaacatttacgaatcatccctttgttactgccgaaaacaaatttgaagctttggctgcacacgatgcaattgtggagactcacggggctttaaaacaattggcagttgctctgaacaaaattgcaaacgatgtgagaatgttagcatcaggaccacgttcaggtattggtgaaattcatattccggaaaacgaaccaggatcgtctatcatgcccggaaaagtaaatcccacccaatgtgaagctctaaccatggtttgcgctcaggtgattggaaatgatatggcaatcgctgttggcggaatgcaaggacactatgaactaaatgttttcaaaccggttatggcagccaactttctgcaatcggcaagattattaggagatgcctgtgtttcgtttgatgagcattgtgcacagggaatcgaacccaactacaaacgtattaaagaactggtagacaattcactgatgctggttacagctttaaacaccaaaataggctactacaaagctgccgaaattgctcagaccgctcacaaaaacggaactacacttaaagaagaagccgttcgtttaggatacgttagcccggaagattttgatgcctgggtaaaaccggaggagatggtctagattttagattttagattttagattttagattttagattttagattttagattttagattttagattttagattttctctataaaaaaatccattcgctgtgcgaatggatttttttttagagaactgaatactgtgactgtatactaattcctctttctattttccgtctacataatcctgcaggtagctaaatcgctctgttagttttcctttctcagttattttagcacgttttaagattccgtccttatcaccattgaagaaagccggaattacatgttccataaattgctctccaaaaccttcacttgcatctttcggaatttcacacggtaaattatcaaccgccatcactgctactgccgctggatgaaaaagatccacttctatatcttctaaaggaaaataaccgtacaaaggatcggcaattgtcgaagatctcaacgtacaggcaattggtccgttaacatcacaagaaatatcagcaacaacttttaacttgcagtcgttcgcattcagcatttcacgtgttaaaatcattggtgctcccgttgcataaaaatgacctgcgaaataaatatccgttacttttgtaaatttttcaaaatcagaaacatattcctccggatacgctacaaaatctttaaaatcaaccacctgaccatcaatacgcttattgtattctaaaacatctaactgtacataaatagcctgtgcataatttttagtcagataattatcaactgtaacctcttttacttttatggcatccaaaatctctttggcaccactccctactttacccgttccggtaatcacaaatttcaaagcgggcatggtaatgcgcttcaaatgtttaattaaagcctcttttccgtcaagtgtttctgctttcggcagcttaaacaactcaaactttatcccaaaagcacgaattccgttgtaaacgccaaccattccggcataccttccaaaaccaattaaacggcggttgtgagcatctactatagtttcatgatcgtataaatctatatttttttccaaaatagcctgtaacagttttcggttataaggctgtttcttaatagtatgcgaaaagaagaagtaagccttattcggaatcaaattctcaaccggaacttcttttactccaaataatacatcacaattagaaagatcttccgtaactgtgattcccatactcttatattgtatatccgaaaaaatcctgatatcagagctctctacctccactactgcttcgtgatacagctgtttcaattttgtaagttcattaggagcaaaaacaactctgcgatccggcgggttttttctttcttttatgattccaaatttcatttaaacgggtttaaaataattattaatataactttttacatcttatttgtttcaaatataacaaatttagttaaaattttgttgaaaaaatacaatttagaatgtttaaaaaccgttaaaagctgacaaacaaccaaataaataaacaaattataaattttttgttaaatcttgattttaacctccattcataactttgaccattatcactttgcattattggcaggtaagtcaatgtttaaaatctaatttgaatgatagtaacaagataaaacactctcaattttagagtgaaaatttatcggggaggcttttctgtaccttaaatttttcacgcatttttttatagaggtcaaaagacttctcttttctgaaaaaagggaagtggatttctattgcctttttgaaaatttacagcttacttttttagactaatttttacagaataatctgtatgtaatacattgatatctcatgaacttcagttcagacccaataaatacccttgaaaatcttattgctaaaaacaaaaccaaaagcttttcaatctatttcattattcttttggcggttattgtttttttaatgcttttgccggtcattaaagttgacattagcagtcagagtcgtggtattgttcgcagtagaacggataatgtacctgttgcaacgatggttagtggaagggtgaattggatcaatttaaagaataacgcagttgtacaaaaaggagatactcttttaaaaattgccaaggaaaatctggagagtgataaaagaactcaggatactttatcaaaatctgtttcagcactgctcagagatgtttcagaccttttgcagaataaaacaaatcatttattgacgactgccgcgcgcgaggatctattgaaatttcagtctgggaagaatgaactgcaaagtaaaatctcgcaggcacaaatcaattatgaccgcaataaaattttatatgataaagaaattattgccaaggccgattttgaaaaacttgagtatgaattacgtttgtccaaacaagccttgcaaagtttcgtaagccagcaaaaattaacctgggaaaatcaaaagagagatttagaagatcgtttaaagaacctcaatggtgctgtcgctaagataaatgcagaatcaaataattatgttgttttggctccagtttccggaacaatcgaaaactattcaggcattcaaaaaggctcttttataaatgcttcccaatctattgcagccatttcatcggcagatcatcttattgtcgaatgcaatgtttctcccaatgatattggtcttattaagagaaatcagaaagtcaaatttcagttagatgccttcaactacaaccaatgggggttgctggaaggaaaagtgattgatgttgatcgtaatatcacgctgcaaaacgatctggctttttttaaggtgcgatgcgccttaaattcaagaaccttacaacttaagtctggttacgaggccaacatttctaaaggaatgaccttaacagcaagatatataattacccgaagaagtttgtttgatttgttgtttgacaaaatagacaattggttaaacccaaaacaaataacaaatagcaaataaaatgagttcaataaaaataaaacaacatgatgttaaagattgtggtgctgcttgtctgtcttctattggaagtcatttcaacgttaatctgcctatagcgagaatacgccaatttgctaataccgataaacgaggcaccaatgttttaggtatcattgaaggtgctgagaaaatgggctttacggccaaaggcgtcaaaggcggtttcgatgccttagataaaattccgcttccggcaattgcacatattgtcataaaagaacagttacagcattatgtggtaatttataaggtagaaaaatctaaaatcacggtcatggatccgggtttaggcaaaatggagtactataccttcgaagaatttcagaaaacctggtcgggagtattgattctttttgcaccaaatgatgattttaaaacagtaaacgagaaaacggcgcctctaaaaagattctgggatttaattcaacctcataaaacgatcttacttcaggctctggttggagccattttgttcaccgttttgggactggcgatgtctgtttacatccaaaaaataacggactacgttttggtagatggcaatagaaaattgcttaatttattgagcctttctatgatagcaataattttactacaagcttatattggctccaaaaagagcgtttttgtgatgaaaacgggacaattaatcgacgcaaaattaattctggggtactataaacatttactgcatttgccacagcgtttttttgataccatgcagataggggaaattacttcaagaataagtgatgcggtaaaaattcgctcgtttataaacgaagtagccattgaaatgattgtcaacctctttattgttgttttttcatttgtattaatgtttacgtattattggaaactggcgttggtaattgttttggtgattccgttctatgccgtgatctattttgttttaaataaattcaacaaaaaagtggaacgaactatcatggagaatgctgccgaactgcaaacacaattggtcgaaagtattacccatgtcaggactgtaaaggaatttggaatcgaagatttctctaatctaaaaacggaaaacaaattcgtgaagctattatttacgacctacaaatccggtttaaatggaatctttgcaggaacttctacccaatttttagcttcggcttttactatagttttaatgtggatcggatcgggttatgtaattgacagggctattactccgggagaacttttctctttttatgcgctgattggttatttcacttcgccggttgcctctttaatcaatatgaataaaacagcacagaatgccttaattgcagcagaccgactctttgaaattatggacctggaaagagaggaaacagaaaataaaatagaattgcagaaggagcatttaggagatatcaggtttgaaaatgtctctttcagatatggatcccgtctggaagtttttaaaaactttaatgcggttttcaaaaagaatcaaacaacagccatagtaggagaaagcggcagtggaaaaacaactttaatctcattgctgcaaaatttgtatcctatcaaagaaggtaagatttatatcggagaatatgattcacagtttgttcattaccagagtttgcgaaaagtgataggagttattccgcaacagctgaatttattttccggaaacattatcgagaatattgctttaggggattcgtttccgaatattcaaagaattttagacttgtcgaaacaactgggaataactcaattcgttgagaaattgcctaacggattcgaaacgcaaattggagaaaatggagctatgttgtcgggtggtcaaaaacaaagaattgccattgccagagctctttacaaaaatcctgagattttgttgatggatgaagccacagcatcattagatacggcctctgaaaaaatggtaaaagaggtgattgataattttaaaactcagggaaaaacaatcattgttattgctcatcgcttaagtacaattgccaacgcagataccatattggttatgaaaaacggagcgatcgtcgaatccggaaatcattttgaattgttaaatcaggaatcggaatattataatctttggagtaaacaaaatttggtttagatgggcttttaattagaacgattgattttgtgccataaaaatttcttgtacgtgttattgtcctagccctgatagaagcggtatcctttttcttgcttctttagcaaggaaaagatataggcggatggttactaagtgcttcttaatgttttctctaagttgttttgatgcagttatttcttcaattttttaatatcggcttcaatttctttcaggctttgttcgatttctagtgattttctactttctttaaatttttcaaattcctgggtagatttatccagagccatttgatgactaattttaccggcgtgcgacaacaactctcttccgttgagttgtaaaatactgtcgagacgttctgcccaatctttcatgtacatgggggtttgctgttgagccatggtctcagcaaaagctaaatattgctctactaataagcctagaagttttatttcatcttcagtaaggtaatttttggcgatgctaacatctgttttctgaactgtttgatcattttttttatcaaaagactgcattcctaataatggtaaagaagcgtctactcttcggtagactaattcagctgcagtattttgagaaattgcccacagcaatttattttgcaccattttgaaaaatgaaattgttttttcgtctttggcatcataatcaatacttgtggtataaatgtcttttattttttggtagaagaatttttcagatattcgaatctcacgaatgcgttgttgcaattcgttaaagtaattcatggtattacctgatttaaatcggtcgtcattcaatgcgaaaccttttacaatgtattcttttagtctttgggttgcccaaatacgaaattgcgttccctgaagcgattttactctgtaacctactgaaattatgacatcaagattgtaatgtttaacattgttttcttgtgtttttccctcaatggctccatgtaaagaggttagtcggaaatcccgacataccactttttcgtctagttcgccttctttaaaaacattaataatgtgctccgtaatagtagatcttcctttgccaaaaagcaacgcaatttgtgcctgagttaaccaaactgtttcttcttcaagtcgtacatcgattttaatagtaccttcctgattttgatacataagtatttctcccgtgttcatatttatactattctttcataaaattcgttcctatattctttacttccggactgttgatgcgctactgcaaaaaaataatctggttgctaaagtattgaataaaaagttaagattagtagataaaatggtaaagcatgtcaatagatgtctattttatgaatgaatttcgcattagttttgttgagtaaattcttgcaaaaaagtattctctagccctgatagaagcggtatccttttttcttgctcctttagcaaggaaaagatactagcggatagcaggaaatagctccagaaaaagaaattcccaaattcaaaaattcttcgactttgctcaggattacaataataaacaccagaaaacgttatttctaaacttcgtcatgctccaaggccataaaacctcagcttaaaacctcccaaaaccccaacaaaaactgtatactgtatacgaaaacgtgtaataattacacacttgaaaatgacgcgaaaccgctaattcattagaaatcagtaaaagaataattatggcataacgcttgcaaaatggcattagtatacaattctctccattaatcaaaatgtagtattggagggaaagaattaaataagagccattagaaagcaatcaaaagtaatgtcatatgaaaagtgaaaccttaacatcagaacagttttatacttcaaatccagatcttaataaccaacaagccttaaacagttccatttttcgtattagtaacgccaatgcaacttcaaataaagtaagcgaacgaaccaaaagtaagacggggttgtttgtattggtaagtacatttatccttatgtttattggagcttatactgcttatcagctgcaatctgactttgatcagtttcagttggagcgaataaattcaagctggggattccctttcctgatactggcaggggcattgtttgtgtttcaggccggagtttttctgtacaatttatacttgtattttacttataaaccaattgagtctgtttcggatgaaatgttaccaacttgtactgtgattgttcctgcctataacgaagggaaattggtttgggatactttaatgagtttggcagagagtgatttcccggagcaaaagatgcaaatattagcggttgatgacggaagtaaagacgatacctggtactggatgcagcaggcaaaaataaaattgggagatcgtttgacgatttttcaacaacctgaaaatagaggaaaacgtcatgctttacaccgtggattcgaattggggacaggagagatcttcgttacggtagacagcgattcaatcgtaaaaaaagatactttaagaaacttagtgagtccgtttgtagtagatgaaaaatgtggtgcagtagctggaaatgttcatgtactgaacaacaaaaaagcaattttacctaaaatgctgaatgtaagttttgtgatgagttttgagtttatgcgttctgccgaaagtcagttagggtctgtgctttgtactccgggtgcagcagcagcttacagaaaaacctcggtttttgcttgtctggacgaatggatcaatcaaacttttatgggacagccctcagatattggtgaagatcgtgccatgaccaatatgattttgagacaagggcagcatgtgttgtttcagagaaatgcttatgtattgaccaacgtgccggaagaatatacgggattgtacaaaatgtttatcagatggagcagaagtaatgtgcgtgagaacatcgcaatggcaaagtacgtttttaccgatttcagaagtgaatctaaattcggagcacgtcttttatttgtgagtcaatcgatgaaaatgattatggcgtatccgtttatgttttttatgttctttttcatcgcggtacatccgatattatttttaagttctacacttctagcgattttaatcgtatcgagttttccggtattgttttacaccaaaagatataattttgctgattcactttgggcttattcgtacagtgttttttataccttcagtttgttttggattacaccgtatgctattgttacagccaataaaaaaggctggctgacccgcggattggcatagaaaaaaaatattgtaattaaaaaaatagaaattgatttgtttttttaggactccttctcatctgagtgggagttttttatttttagaagaattaggaattgagataaaaaatgaatgcgtaaatctttgtgttgtttttaaccgcaaagaacgcaaaggtttacgcaaagatcgccggaattaataacgtatataatgatggtgaaaatctactgatcagtagggtgggagaatagggaaacaaatctgaatgattcttgtgttgcttttaaccgcaaagaacgcaaaggtttacgcaaagatcgccagaattaataacgtatataatgatggtgaaaatctattgatcagtaggatgggagaatagggaaacaaatctgaatgattcttgtgttgcttttaaccgctaagagcgcaaaggtttacgcaaagatcgccggaattaataacgtatataatgatggtgaaaatctactgatcagtaggatgggaggatagagaagcaatctgaaaaacagatcatgtttcaataaaaaaacctctaaagttttaagtttagaggtttcaaatattttaaaagtgtaaacgattattgctgctctgcaattgttgctttattaagctttataactctgattttcttgttggtattatcagataaatacaaacgatcgttcaattgtgctacaccaacaatacttccaaatggattttgtcccataatatcaagagcatttattcttggagtatagattcgatccttgaattctccttttggatacagtcgtaagtagttattactccctatattttcggatgtaatagtccagtctttagaaaaacttatggcaataggctctgcggcggcaaaaactgctgttacgggttttatgggttcagttaaagaggcagcagcattagttttaatagactcaatgttgtaatacaaataacttttagcatctcttccggctactactaaattgcctgcatctatatccatagcatacacctcatcccaaccatttaaagtgtttaatttagcaatgggctttagattccaatcactgctatcggtaatttgggtagtttgaaaaactttgattgaagtttgtttttcttttacgaagatcaaaccatctttaaccacaacaccaaaaacgtgcacaaaagtattccaccactgaccgtttccaacggtattgattccggcatttgtaatctcatccagtacaaaaagtctggaatcgacactcccgacataaagacggccgctatctacacaaactgaagtaagtttggtaaacggaatcgtagtcgctccttttgtataagccgagatcgttttgatgtaagccatagaaacagcatcaaaaacttctagtacgtcaccattacaaacgtatagtttattgttggcaaccgtaattcctttaggatctaaagttcctgttcctgctccaatttgagccgctgtgatggaagcttcttccgttggaaagtaataatcgtattttgttggttcactgccgtttgaagaatcatcgctacaagctgtaaaaagacagagtaggaggaataaaaaaggtattttgttcatgatagttttgtaggttatttccattttccttctcctttatattttactaaaaatgggtttttaggatcaattttgaaaacaggttttttataagatttacttagatagctcgtttttgtatatccttttaatatatcaggatctgtaaaaggaaggtcattgagataaattaaatacttataaagatcagtaagcatttcctgctgacctccaccttcaccactgttggctaaattactgctatggctgtagcccgaatgatgagagtattcatgtgaccaaaccgacatttcaccttgccaatggccagtcacataaccggattcccattgtgaagacaaagctcctcctccccaggcagaaccacctcctaccatggccatattcatagttcggctgtcgatataagtattataggcttgttcgatttgggctttggtcagataatcgtaaacaccatctttgtcatcagcatttccgtgccagtttaaagcaccatttacagtatttgttcctgccgctgctgcttgttcttttttataacggtcaaaattcataaaagtgtcataatacaaaggatgacttatagcgtaggagtagttaataatcatagcgatcgcttctttagccaaaacaggattcatgggtaaaaatttgttaggatcatcagcaggattattaaggtgatattgggtgctgaattgtacgagtcgatttgacttgattcttttgaacatagcaaataaaggatcggttgattctatcgaaaattcgattgttcccgaagagaaaccatcaattttatcaatggtaacagccttgccattttcaagctgatagtcatgagttccgtttactaatggaatttgatgcgcagaacggtgaaaagcagggatagttgtaaattcaaaaagcaaaaaacgcttgtcatagttcggtaattttgcatacacttttacatctttaagtccaactggagaataaagagaaacttgtacagaatctttccctttttgaatgacttgcataagctgattcatgcgaaaaaaacggtctttgttgtcatacatttttgaagaactttcactgtcttcaaacatggtcattggtcgattttctttgggtaaagttgtcgcatcaatggcaggtaaataatttgctttgtagctgtcaccttttgaatcatcatcgctgcatccgaataatatgcctgcgaaaaagacaaatggtaaaaaataagaaatgggttttctcatagggttagtaggttaaatttggggttatataaaaaaataatgttgtttaaataaatttttaagcgttgtttttgaggcaatttcgggcaaaattaaaaaacttgtttgtatttcatttgcagtttgtagctactgatatcgtttgtgtaataattggttgtttgattcgtaatctgctgctatctcaggataacatgatctaaaaaggggctaatatactcaataaaaaagtaatttggctgaaagaaatttgggttctacagtttaaaaattgtgcttttttagaatttttgtttaaaacgaagataggaatgaatttatctaaagacttttaaattggtgtaaaagtctttaagttttgtgcagaaaaatgaagcgcttgtgattactgtctcgtgccttctacgtccaaattcgaataaattgactagtgcaaagatgtttttgtagcgagttgtttccaaagttggtaaagggttgtatgccaatagaaactatttttaaaggtgataataaagcaggattctaaattgttttctttttttacaaaaaaaacaataataaaagaatgttcattcatttattgtattatatttgtgctaaaataatcagtatgagagcaagagatgtcgacaaagaaaaattagtaatcgaaatggcaattgatcagattgttcaggaaggatttcagggttttagtatgaacaagctggcgaaggcctgttctatttctgttggcacgctttacatctattacaaagacaaagatgatttgattcaaaaaataggtgccattatcgcgctgaagttttttaccagcaccgtgaagaacttttcgcctgaaatgtcatttgaggaaggtttatggaaacagtgggaaaaccgcgccaactttaccatgaagtatcccaaggaagttgcattttttgaaattgtcaaacattcccctcattcagagatcattctggattctattcaggagtttgcagattttagaaggattatgaaaacgtttatagacaacggcttacgcaataacgagctgattcctatgacatttgaggctttttggagtgttgcctatgggcctttgtacactttattgaacttacatactgaaggtaaaagtatgggaggaaaaccctttacacttactaaggaaattatgaaagaagcctttcaggccactgtaaaaggactaaaaccatgaaaaattatggaaacaaatttaagtacaatacatatttttaaaacaaacattggcgacaaagaccccaattgtcccatccgtcaaaaacttgacactcatacagacattcagcaatggagcattgactgcgaagatgttgattgcgttctcagagttgtttcagaaacattacatcctgaaactattattgatatggtcacatcctttggccatgaatgtcaagagttagactaaactaatacattttttaaagaatgaaaaaaaacactacagaaagcccggctttctcgacacaccaaaaaatcattattgcgatattagcacttttgcagttcaccgtgatactcgattttatggttatttctcccttaggagatattttaatgaaaaccctgaacatgacaccggcaaattttggttttaccgtttctgcctacgcctttagtgcaggagcttcaggattactcgctgcaggttttgcagataagtttgaccgaaagaaacttttaattttcttttatatcggatttattataggcaccgttttctgcgcactttcaaccagttatgtaatgctgcttttggcaaggattgtaaccggacttttcggaggggtaataggatctgtttccctggcgatcgtaacggatttgttcgtgattcaccaacgcggacgtgtgatgggatttattcaaatggcatttgcttccagtcagattttaggaattccggtaggcttgtattttgccaatcactggggatggcattcggcttttattatgattgcagttctggcggtattgattcttattgctattatcactcagatgaaaccgatcaccaaacatttagaagtgcagtcagacaaaagtccttttttacatttgtggcataccctgagcaacaaacaatatcaggttggttttatgtctatcgcttttctctcggttggaggttttatgttacagccctttggaagtgcctttttagtcaacaatattcacatcagtcagctcgaattgccaatggtctttttctttaccggactttcggtacttttcattatgcctttggtgggtaagttgagtgataaagtaagtaagtttaaactgtttgcggccggatctatactttcggttattatgattatcatttacaccaatcttggtccggtacctctttgggaaatcgtagtgtttacgatgattatgtttatggggattatgagtcgaatgatccctgccacaacattaaatacagctattccgggattggaagatcgtggtgcttatatgtcgatttcgtcttctttgcagcagattgcaggtggaattgccgcggtttgtgccgggtttattgttcatcagaaaacaaaaacatcacctctcgaaaactatgatattttgggatatgtaattgcggtaattacactttcgacaatatttttgatttggagagtcaataaattggtggaatcaaaagatactgctgctcctaatccggttccggaaatggcagaagtttaattttttagatttcaaatgaaaagaaagcttgtctgttaacgacaagcttttttgtgtataaccattttagattgaattacaatcgaaaagcagtttctacctgatcaatgaaaattctgaatcttaattcaacgctgatctaacggattcgctatcgcgaagacactgatcaaaacggattttaaaattaaaaatctttcaaataaggaagaatccgttttcattcgcgttttcacgaagtacacccgttttatccgtgtcgaataaaaggaagtatttgaaacaatactatctgttctttgttgcactgctaaaccggaagtggatgattaagttttaatttttctcttccaatacagatacaccgaaaaagcgtttataacagccagtgcccataaaatgggactggtgaaaaagctctcataacttcttccttcgggaatttcaacaaaaggaacggttatcaaaacgtccaaaaacaatgctgttcccgacattactattccaagcgtaagaccattggtgttgtattttttctgataatagaattttgcgccaatgatggcataaaaaataataaataccataacgattgcggcttgtattagaaaataatctttgagaagggaagtattacctaaaagataaaaagaaaaactaacgcacaaccaaactataaatcctgaaaatattcctctgctatatttcataatcttatatcaattttacttatattttagtccaatgttttccgatataatgccgatgtaatatgaaaatagtacaatgcaattggactatattgaatatacaatcggtattagttttaagagttccagattttggtcttggcagtttcttttgcgtaggcggaaaaatcttttgcttttctgcccagaatgttttctatatctgaggtaatactggaatttcgtccatccaaaacctgttcaaaaagatagttgatgagccaaatatgatcttccggaacctgatattcctgcaaaagctgattgtattgttctaacgatagtccctgaaaggtaatatttcgaccactggcttcggcaatttcatttacggcttgttggaacgtcagtaatctgggaccggttaattcatacgtttgtccgttgtgtttgtcttctaaaagagcgaccgtaaccacatctgcaatatcatcggcatcggtaaaaggttccagtgcttctgcccttggtaaggcgactattccggctaatatcggatctaaaaagaaactttcactaaagttctgattgaaccagctcgcacgaataatggtccagtttttggcagccgatttaacgatttcctcacaaagctgtgcttctttttctcctcttcccgaaagtaaaaccattttttgtacacccaattttgtggcaagaccagtaaaattctgaatagtttctaccgctgaaggaatggctaagtctggttgaaaagtaatatataccgtatcgatgtcctgaagaacagttggccaggtttccggtttttcccaatcgaaaggtagtttttcatttcgggaacccaaacgaacttcaataccttcaatttgttctaatctttcggctactctgcgtcctgtttttccattggaacccagaactaaaatttttgtatttttcatatcagtattttttaaaggattactgatacaaaggtgtttcaattaaaacagattcatttgtcgtaaaagaattatgatttgtttgaaaagaattgctgccgaacttcatttgggcgcctaccaaattttttatgaaaggcattcgaaaacgaactcagactgtcataacccacctcccaggccgattcctgaactgttttttcgttgtcacgcaacagttcgtaagctttgtgcagtctttcttcctgaacgaatttgaaaacaggaatgccaaaaagttctttaaaattctttttgagtttgttactgttcaaacctaccatttgcgataattgtgtgattgatggcggttttgaatagctgttggttacaatttcttttgctttgaaaagtttgtttttatcaatttccgaaagatcaattttggtacctgttgcgagcaacgcatagaagtgagccaaaagttcgttgacctgacttcttaaaaacagtaatctcgtattgccggtgtaggtggtattgaaaatcttttgaaccgctacctgcatctccaaagtcatataaaaggaaggcccctgaacaaaatgttcctgcggatttaataattccggaagataattttcaaaaatttctttctcggcctgaggcagggaatgtaaatgttttggtttggtgaagatgctgatggactgtagtggtttatctggttctattttatgagagaacccgaccttttgattgccaaaaaaacaaatggcgagtccggttgtattggtcaggtatttagtctgattgttgtgtttgatttccagttcaacatttccggagccataaaaggcaaagccaacagcatctccgtcgatttcacattgctgtatgaaagtcttggaggtgttcgattgttcgattaaaacaataaaatcatttaattctataatgtctgttgtcattggtttttaaggatttgactcgaaattgtctgaaaagttacaattatttttaatatgtgccattcctacggaattcaaatgccgtggtatcattttattcaacggattaaaatccgttgttacaatatcggtcgttcctccggaactttagggcgagagcctttggctcggccaattttgtagggatggattttaatccatccaaataataaattggtttcgaacgtttgaattccgtaggaatgacctatgctaatggatataatatgtgccattcctacggaattcaaaatcgtgtaatatcattttgttcaacggattaaaatccgttgttacaatatgagtcgttccttcggaactttgcggaactttgcggaattttgatgatgggtactttttattttcgatggattaaaatccgttgttacaatatggagcgttccttcggaactttatgggattttggtgatgtgtttgttttttttgaacgattaacatctgttgttacgacatagacggttcttcggaactattgggagagagccctcggctcgaccaattttgtagcaacggattttaatccgttgaataaaaaattatcataacaattgaattccggaggaatggcgcatattaaaaacgccaatctacacattccaaaacattgcctgaattttaaaacaaaaaaaccttcccaaaaaataatttgagaaggctcctttttaagtagtcgatcttgcaaccgacccacttttaaacaaaataaagatataattgaattagtaagctaaaattcccagcgcacaaaagcttccattgcggcataacgtgacaaacctaactgattgtacaattgagctgtttcgctatttcggtcttcggctctttgccaaaattctctggcatcggtaccctgaaaaacaacaccgtctttttgcgactgatgtttgaaaattccgtggcgttttgcgagtacttgatcaggactcatgggtacggccatttcgacctcatcgattccccattcctgccaggcaccccggtagagccacacccagcaatcgttcataaaaggttttggctttagtgtttttacagcttcaaagatcgcatccaggcatactttatgcgttccgtgcggatcggctaaatctcctgccgcatagatttgatgcggtttgattttttcgattaaatcaatagtcagttggatatcctcacagcccaaaggttttttttcaatcgctccggtttcgtaaaaaggaagttccataaaatgaatctgttcttccggtaaacctacaaattgactggtggcgcgtgcttctccttttcggatcagtccttttaaatagcgaacttccggaatatcaatttcactggcttttttgttttttaaaaagtgttccgcttttttgcagatggtttcagcttcgatactttgaattttaaatttgtcattgtaatcacagacaaatttggcaaatctcaaggcttcatcatcggcaacggcaatatttccggaggtttgataggccacatgtacctcgtgtccctgttcctgtaaacgcataaaagttccccccatactgataatatcatcatcaggatgtggactaaaaagcaatactttttttcggactggttctgctctttccgggcgatgggtgtcgtcagcatttggtttacctcccggccaacccgtgattgtattttgaagtttattaaaaatcctgatgttaatgtcgtatgccggacctgaatcggccagtaaatcgctcattccgttttcaatatagtcggcatcggtaagcatcaaaattggtttctttaattcgagtgccagtcctaaaaccgcttttcgaatcagtttatcggtccagatgattttttcaaccagccagggtctgttgatacgcgttagttttgaggatgcttctttgtccagtacaaaaacaacctggttgtgttcctgtaaaaacgaagcgggaatttgattggtcacttctccttcaaccgattttttaatgatagtagattttccttctccccaggccattaaaataacctgtttggcttccattatttttttgactccaagtgtaatggcggttcggggggtattacttaatccggaaaagtctccgctggctgctactctggtaatgtgatccagtgctaccagacgtgttttggagttttgtagcgatcccgattcgttaaatccaatatgaccgtttccgccgattccaagaatttgcagatcgattccgcccaaagcttcaattttagcttcatattcgtggcagtaatccgcgatttcttctttggatagttttccgttgggaatgtggtagttttcaggtaagatgtctatttgatccagcaacaattctttcataaatcgaacataactgttaaccgaatccggttccatcggatagtattcgtcgagattgaaagtaattacgtttttgaaacttaacccatcttctttgtgcaaacggaccagttcggtatacaatccttttggagaagagccggttgccaagcctaatacacaagattcgttgtttttttgtttggattgaataagtgccgcaatttgctgagcgactgctttagaggcttccgttgaattttcgaaaacaaccgtattgatgttttcgaatcgtttttcgaaacccgttgctttatcgatgttactttttatcattttagtttagttttgaccttttaagatagtatccaaagaaaaagtattagtcttcgtttgaaggttttcctatggttgccaatattccgccgtcaacatacacaatatgaccgtttacaaaatcacttgcttttgagcttaaaaagatggcggctccctgtaaatcgtccggatctccccaacgtcctgcgggagttcttcccataataaattcattaaacggatgcccgtttactctgataggtgcagtttggctagtggcaaaataacccggcccaattccgttggtctgaatgttaaatttagcccattcggtggccatatttttggtcagcattttaagtccgccttttgcagcagcataagcgcttacagagtctcttcccagctcgctcatcattgaacacatgttgatgatttttcctcctccgcgtgtgatcatgccttttgccacattttttgaaacaataaaagggccggtcagatctacttttactaccgcttcaaaatcggcaacttccatttctataatgggagttcttttgataattccggcattattgattaaaatatcgattggtcccacttcagcctctattttgctgatagcggcaattacagcagcttcatctgttacatcaaacaggtatccgaaagcctcaattccttctgatttgtattcagcgattgcatgatcaacagcttcttgcgaagaatgatcgtttactacaatttttgctcctgcatgtcccagccctttggccattgccattcctagaccatgaactcctcctgtaatgagtgctgtttttcccgttaaatcaaataagttaattgacattttttgtttgtttttggtgattagtaattttaatttgttatcgtctgggtcgtttatttaaccacatagaaacatcgattttttgaaagtaaaaggatactaaagagaacccccatttctatctcatagttctttgtcttttattccgggtgaaacgtttttgatacgtcacataaatcctgtttctatgcgttaaaaaatgtaggtaaagttgtttttatgactattttacattgaccgttaatggatttttaagctcttcattaaaatgatcgaggtaactgaaccattgtctggccgaagtaatttttccggccttgtcccaggctgcgccagtatagtagacaagaggttcgttgcttttgacagtggtttgggtaagtaattgttctttggttacccacatggcatttgcgggtgtcgttaagattgatgctactccggtagtaccttctttatcaaaagtaggttcccaataccccataataccttgtttttcgtttaaagaaagaactccggctttcgctcgtttgataattccaactacaaccggtaaagggtttttatcttcgaatgtatacgtgttctctattcggttgagctgtgaaccggcatctatagaaataattttagtggctttaacgggtattccaccggcattccagaggtcatatgtcagttgaaaagtggtacggagaggtccattgtctaaaattttccattggtggtaattgcccgaatatcggatggtatcttttacgtacggagccatatttcctgcacctaaagtgtgtcctacgtgataataatccaatccgtcgccatggtcgatatgatagtcgttgcgtttgtagcgatcgtttaggacgagtttatcggttcgttttacccagacatcataaccgtacgcatcaccttcagttttttcaagagcctttccataggcacggaaggcaattttatcattttcccaggcaaaatcgtccagacgttccggtacataacgggcataggttttgacagcaaaggcttccggttttcctttttgaacggaaagattcagagaggcttttgcttttaaatcaatttggaccaataaattttgaacggcagcattcccgcgatgttctaactgatacggaatttgctttttggtgagggtattcaatacgacaaagtttgcggtgtcaatttgcggacaggaggaaagtaccgatttccaggggatggttacaaccgtttctttgcgatccagagccgaactattgtgaaggattattgttgcttttgtttgtgcaattgtagtgaccggcaaaataaaagtcagtataagaaggagttttattattttcataaaggggtattttaatttttaaacgttgatttgggattggcatttttttcagaaaaacagttccgtaaaggcatagttcgagccttcctgttccaaaatgactgtttcatctggataggattctgattttcaaaactgaaattcggaatgagctaaggctttttaaggccttattttagctgatgtctaacgcaatagtatcagaattttataaagttttttttgcatggtatggtagtttgtgtcgtttaaattattcttgtgtatcgtcgatttttgctaaatattcactgggcatacagccataatgctgcttaaaggcggtagaaaaataagaaggcgagttgaatccgcacatataagtgatttgtgcaatcgtatagcgtttgctctgcatcaattcgaccgcttttttaaatcggattcgtttgataaaatccatagccgattctccggtaatggcttttaattttaaatacagattcgatcggctcatgccaatttcccggctaaactggtccactgaaaattcagaattggctaaatgatcttcaacaatacgaatggcctgttttagaaactcctcatccagcgtattaaaagcaatattttccggaaccatttcttttccaaccgcataatattctttcagtctttttcgggagcgcaacagattggtgatttttgcggcgagtaaaggtgtcgaaaacggtttggtaatataatcatcggcacccatttcgagtccttttatctgctggctggtttcggttcttgccgttaaaagcattaacggaatgtgcgaggtgttaatgttttgtttgacgcgtttgcaaaagtgtaaaccatccagttcgggcatcatcacgtcgctaatgatcaggtcataaggctgaatttccagaagttccaatgccatttgtccgttatgagctacggtgacctcgtatattttactgaaatagtcctgcagataatctaaaatctctttgttgtcgtcgacgataagaagcttaaccggttgatttttttcgatgatttcattttcttccggcagtaaagcgtcttcattttcaaggtcgttgtcggacaggattgcgaggtcataagcagattcctccacatgctgatcgtttttataaacagcatctgaaatcggaatagtgaccgtaaaactgcttccttcctgcattttactttcggcagtaatttcaccgtgatgcaattcgaccagacgtttggtaaaggccaaaccaacacccgaacccaaattcatttcgcgattgtttacctgataaaaacggtcgaaaaccttggataaatcttccgcactaattccgacccccgtgtcagtgacttttatttgtaccgtatcctttttctgtaatagtgtgacagcaatactttggccggttttagtatatttaaaagcattggataaaaggttgaaaaggattttttccatagcatctttgtcaaaataaaatgacaattgcggctcttcagaatgataggtatagtgaatgctgtttttctctgaaagcggtttaaaagactcaaaaatctcttgagtaaagttcacaatatcacctttgcctatttttaattgtcgcgtacccatttcggtttttcggaattcaaaaagctgatcgaccaaattatacagtcttttggcattgataaacatgagttcatgtttctttttggaaactttatcggcaaaaggcatttttaaaagttcttccaaaggtgctaagatcagggttagtggtgttcttaattcatgagaaacattggtaaagaaatccattttaacctgattgatgtagtttacgcgttctttatcgattcgttccaattttaattgctgaacggcttttattctttcttttataattttaaaaccaatataggctgcggtaccaatgatggcgagcaataacaatgaaaaccagatggttttataccagggtgaaagtataacaatttttaaatttcgaacagcactcatttctccgtttggtccaatggctttgatctggaagttgtagtttcctgcgggtaagttgctgtaacttactttaagctcatctgttcgctgccagtctttgtcgattccttccagtttgtaataataataagttcgattggaagaaatataattaaacgtattaaagaagatgctgaactgtttgtattcaggtccaatttctaattcgccggtttggtcaatatgtccttcaagtatgtcggtatcgtcaccggcgacaaccgttttgttcaatacttctaaagcggtaaaatttaattttaaaggaagcggctgctgttttatcagagcgggatagaaataggaaagccctttgatcccgccaaaaagcagcataccgtctttggctttacaaaaggcataatcgttgaactgcttgttttgtaaaccgtcactttcgtcaaaagtctgcacagaacctttgtccggattaaatttgattaagccgctgttggttgaaatccacaaacttccttcatcgtccggaataataccgtaaatggtttctttgacgaaatcttttcgcgctttaatcgttttgaaagattcctgcgtttcatcatacaaacgtaatccttcgcgggtgccaatccagattcggtgttttgaatcctcggttacacagtttacaatatcgtcgcttaatttgccgtgaccgatagtggcaaacagattagtgtccggataaaaaagggtgacgccattagtggttccaatccagattcggtgtttgctgtcttcaaaaagaaaagtaatatcatcagatgccagacgttttccggctttgtctaaatgaaggtgtgtaaacgattttgtttcgggatgaaactggtccaatcccgatcgtgtacctacccagatacgccccttagagtcttttaataagctgtaaaccaaatcgcctgcgatcgagttgggattgttttcgtcatggcgaaaacgctgtgctaaaccggtattggggttgagtagattcaacccgccgttgtgggtaccaattaatacatttccgttagcatcaaattcgatggctttgatattgttggaacttaagctgtttgggttgttctcactgttcgaaaaataactgatggtattggcatttttgttccagtaattcacgcctttgtcattacttccaatccagaaattgccttttgcatcctgtttgattgcgccaataacctcatcattcaaagaggggtttccggagttttgacttaacaaattgaacttaatatcgcttttgtggtaataatttagacctccgtaatacgttcccagccagattccgttttgcttgtctttaaagaaacaacgaacagagttttgactgatggtgtaaggctgtgctatttgatggtaatagttgctgaaaacgttggttttaggattaagaacagtaagccctttaaaagtgccgaaccagatatttccttcggtatcttttccaacacatctgatattgttatcgacaatactgtttgcgccggtcgagtggagcagagatgtaacctgaccatttgcggcattgtaacgaatgacaccttcgccttctgtcgcgacccacaactgtttagtatcagcataaacagcgttgatataaggttttttgactcctaagttaatttttgtcagctgatgcgaattgggatttagtttaaacagaccaacatcggttcccagaattatttgtttttgccaaagaccgatgtaggcaatttttttgatttcgtgcgaagaagcattaaatcggatggatgaaaaattctgttcttcagggttcagcacaaaaacttctccggtaattgaggtggcccaaattctgtgtgcagggtcttctatgatcgacgagatgtaccattcgccaatagttcgcggaagcttgtaattggtaaagctgtcggtattgtaattgtaaacgctaattccctgattaccgcccacccataattgtcctttatgatcggtaaacaagcttcggatgtagtacgattgcaaactgtttttgacattccttacgggacgatacactttaaaacctttactgtcataacgatttagtccgtcctgagttcctatccagataaaacccaacgtatcttgttcaatagcaaaaacggaactttgcgacaagcctttatcaaccgaaatcgtacggaagtatcgatcctgtacctgagcctgacttttaacggcaaaaagtataagatagaaaagcacagctagggcaatcgttttcttcatgaaagtttcaattttaatggtttggtttgtgtttgttttcttttgaaataatagccattgttcaagggaattaaaaaatctgctaaatctgcgtgaaaaaaaacagtagaaatatagattttaaactctaaatttaaagaaaaagcaaacgtcttttttgtttttaatttttgtcgtatttggccacatccggtaattcgtcaacagcttcctgtttgtttagcttagtaccattcatttccagtaagaccgaacttcctgcaattttaggagaaaatgttttaccttcaaatgtaatgggtaaacttccgtagctaaataatgattttgcagtttttccggtaacttgtaaagcagccggtttttcgccgtccaattgtacctgaatgtcccagtcgccaatctgaaaatgggataaaccgttgttgtctgatcctgttttaatgacttctgttttaccgtcttttatttgtatgatggtcaggtatctgaatttttgtctgggttcagaagtgattcctgcatgccattggtctttaaattctttgatctgaccttcgtcgttggttactttattccagttgacagcggcttcataaaatttatggtgtacggccatttttagcggactattagcaaaaacactggcgtttacatttcctaaatcggtttgtactgtgaagttttgctgtttggcatttgccgaattttgcccttcaatggtatagtacggacaatgaaactgagtcgtccattttaccggggttttagcttccagttcgtcgtataaaacaatgtacccgccttctagctgcagcatatgtctgcggtacaaggagacacccgattctccgtaaccgtttgctttattaggtactacattaatttgtttgaatctgttgagccagaaatcactttttatgttgccataagcattgctggcatctcctaaagcgtattggatgcgttgaccggaaatcgctctcggaatccatccgtaaccttcttctccaattttttggttcagactgtcggctaaaatggtgttgtatgctttagaagatctgtaatctaaaagattgtgtttgtcgctgaaattgctgtaatagcctgttccgccaaagagcactttccctttataattaatggtaaaggcattttgggaagcgtgaccgtgtcccgaagagccaaacggactgctgaacaaatagctgctcagggttgtattggctttggtcagatcttcgtgcatggctacgacgcccacatcggcaaattttcgagttttagggagtttttcgggcgaggttgccggtaagtttctattgggtttgtagttcagtaacctgaaaaataagaaatcatcagtgccgtgataataggacggatagtctcttttgattgcaccaacataccagttcagataaggatcattcatgcggtaggtcaaagcatctgcaaaccaggcttcgccttttacgatgtacggaatgttttcccacatgtctccaatagcagtacttgccgcaccgtttggatgggtgtaaagcatataatacggtagattctgcatccacggtaatttaaaataatcaacaccgctaaagtcaccaaacatttgagacaggtaaataatcgatttaaagttgactctgaaatagccgtttccttcatgccagccaccatcggtagtgcccaataccggaaaacgtgccgaccagacttcgtatatataggtaagccattctttggcttcagggacatcattaattacagctacggttgcaatggcaaggttgcgtaaggtgatttgccaaacgtggttgtcgcttacatgcagctcaaaacgattgggcaaatggtcgtaaactcttttggctctgatcgtaatgctattttttaaggtttctttttcctgaggagttaaaaaagcataaccgctatcgtaaaaccagcccagggcttccagtacggcaccacttgtaaaatcgtcacctgttgccaggccatcaggattcatgttggcaaggtttaaggctctgcgtttggcatctaaaatgaaacgtttgtctttggtgagctgataggcgatgcataaattgcgaaccggatttccaacagcatctccaaaaccgtggtacattcgttctacaataattttcttttctaacggatttttgcctgtggtatcaattactctttgtggtttttctgttggaagaggagcctccattaatttttcggcgaaagcaacaaattttttggcttcgggattgtccagattgttgcggtaaaaagcttcaccaattcggttcatgtcccataagagcgggtgtgcaccttcgtttcttttaaggacttcgctaatgggaggagctacttttagggcagcatattgggcatcaatgacaaaatcgtaaacaggcgaccaggtccattgactgctgccttttaaagcgtaaccatatttccagtaccattttccggcttttaaagcctgatgcaacgggtaaactgcccaacgttgttcggcactggtgaacgggtttttagtgaagtttttgtcgcttgcgagcatcactttgtagcgtacattgccaatattcggatcttccggaatatcacttccgctttccatcggtgttaccattttttttccattggttcccggccaaagcagggccggagcattggtgggtaccgtaattccgtttacaggataaggccattcacgtactcttgaatgtaatttttcggcggtgagcttaatttcggcaggttgttgtgcaaatgctttaccgcttagaatcagtaagatggggaagcttattttttttatcataacaatcattacttattttttaaaatcatattttgcgacatctggtaactcgtcgattacttcttgtcgggttggtttgttattggttatttcaacaagcattgagcttccgctggtttggtgctgataggttttctttcctagtttaagggaagaagtaccgtaattaaaggccgaacttaatttttcatttttaatgtccagcatcggggcttcatcactatttaattgtgcagacagctgccagttgccaaaattcagctgaaggattccattttttaatactacggattttatggtgtctttagctttgctatcgatttgtatgagggtcagaaagcgcatttttttactggatacagaagttactccggcatgccactgatttttatattcgaaaacttttccgtctgccccagttactttgttccagtttacggctgtttcggcaaattgatcatgcacctgcattttaaggtcattatgagcaaaaacactggtattgactaagcctacatctgtttttacggtaaaattctgctgtttattgctgacagttttttgtgattcgatggtataatagggcacttgaaattgggtagtccattttaccgggttttcagcttccagttcgtcgtaaatcacaacataaccttcttctaattgcagataatgtctgcgataaagtgtaatatttcgttctccatatccatttgcttcattgggtacgacattaattttttcaaaacgatccagccaaaattcattggtgatagggccgtaagcttttgtggcatcaccaagcacatattgaaggtgttttcctgtaatgaagcgtggtgtccaaccatagccgtcttcgccaattttctgtccgagactgtcggccaggatggtcgaataggctctggaactgcgatagtctaaaaggttgtgacgatcgctaaaattactgtaatagccagtacctccaaatatggttttgcctttgtagttaatcgtaaaagcattttgtgaagcatggccatgtccggaagaccccataggacagctaaaaaaataactgcttaaatttttagaggaatccgataaattttcatgcatggcagtcatcccaacatcttgaaaccaacgcgattttggcagttcgttaaatgaagattcccgcaggtttcgctccgatttgtaatttaataagcggtaaagcaataagtcatctgttcctgtaaaatagtttggataatcttttttaattgttgctacataagtattcaaaaaaggattgtttattcgatacgtaagcgcatcggcaaaccaggcatctattttagcgatattaggctccttttcccacatatcgcccatagccatacaagatgctgccgacggatgtgtgtaaagcaaaaaatagggaaggttttgcatccagggaagttgaaaataatcgacaccactcaaatctcctaataattgcgaaagataaagaaaggacctgaaattgactttaaaatagccgctgccttcatgccatccgccatcagtattacttaaaatagggaatcgggccgaccagacttcataaatataagtaagccatttattggcttcaggcatttcatcgactgtagcgactgcgcctattgccagatttcgcaacgtaatttgccagatgtgattgtcgttgatattgatttcaaagcgattgggaagatgacggtaaatacgctcacctcgtaatttgataacagattttaagaatgttttttcatccggacttagaaattcaaatccggtatcgtaaaaccatccaatggcttctaataaagcacctcctgtaaaatcatcgcgagtagccagaccgtcaggattcatgttggcgaggtttagggctctgcgtttggcatccaaaatgaatcttttgtctttggtcaactgataagcaatgcagagattgcgtacaggattacccaccatatctccaaaaccatggtacatggcttcaatgttgatttttttctgaagttcagatttgccggttgtatcaatgtagcgtctcggtttttcttcaggaagtggttcgagcattaatttttcggcgtaggctatgaattttttagcttccggattgggcaggtttttcaggtaaaattcgttacctgttttgttcatattccaaagtctcggatgcggaccactaacacgctgtaataccgtactggctgctggtgaaaccggattgtttgcggctgttgcattaacaataaagttataggaaggcgaccaaacccaatttggtgtgtttttctgacgataaccatatttccagtaccacattccggatttcaaaggctgatgtagtggatacatggcccattcctgctcttcgccagtgattaaattttgtttaaaatcaggatcagaagcgagcattactttataaaccacatcgtgaatttttggatcgatcgcaaaatcatctccaatatctcccgacagtacaatttttttttcgccatttgttcccggccataacaaagccggtgcatttgtatggatcgttgccccatttgcaggataaggccattctcttaatctgccatgcagtttttcagctgtcagctgaatgaccgccggtcgttggctatagagttgaagtgttagcacacacagcaatactatacatattttttgttgcgacatcatcttgtttgttgaattataacccggattgaaaagggtctccgttctttttgcaccattcttttaaataacgacgcagggcaattagttcttttttataggccttgtttactgcaagattggtgatttctcccggatctgtcgtcaaattgaaaagctgttcttttaaatcgcctttattgtaaacgatatacttaaagtctttagaaattacagcgcgtccgctaatgtttaaaagttcttcgttatcggcaaaatcggtttcgataaccagagtatcccgtaggatttcggttggattggctatatttttactgatgtcaattcctttcaaataggctggtttgggtactccggtaaagccacagatggttggaataatgtcggtaccattacaaaccagaagagcatcggtgcgcggtttccattcgcctattttcgaaatgataaaaggtattttagcagattcttcgtaaagtatttgtttctgattccagctatggcctgcatagccgtcgccatgatcggctgtaaaaacgataatagtgtttttttcgatattgtattttttcaaagaagcgagtaccatttcgatgtaaccgtctactttttcaactaagcgattgtaggcccaacggtattgacgccattgatcggcagtccaatttacagtagggtaggttctgaaacttactttttgctgctctcggacaattttaggttcatagtcagggattttccagttggcgggtaagggtggacactgagctggcggtggtgctttttctaatacatccatttttaaatcttcgtctctggcccattcgcaaatgtcatgcggatttaaaaaagaagcgaccaaaagaaaaggagtgtttttgttttctttaatgaagcgggcacagaaggaaggtgtcgccgcatcgttgtaatcctgaaaattggtgttttcgatgtattcaaaaccatgctggctttttttggcagtgggaaccggaaggtgccatttgcctacgtaaccggttttgtatcctccgttttggaaaattttccccatcattagtaaatcgtccggccattgaccgtctttttcaggagcgttgcccacaaagccggtttcaaaaggcatttttccactcatgatggccgtacgcgaaggggaacataaaggctgagcacaataggctttggtaaaacggactccgttttgagcgagtttgtccattgctggggtatggaggtccttgtttcctgcaatactcatcgcatcggcagtttgctgatcggtcatgatgatcaggatatttggtcgtacggcggtttgggcattgccggaaaaaggaatagccagtgcgcccaataaacaaacaaattctatgactttttgaaatatcatatcggcctaatttttatagattacgttttgccttttaaattcttaaatgcaaaaacgaagttaatcatcgggcttcaattggggttttgaatttgtttaaaatgctattaattttatctaaaagccttgatgttccggtaaaagcactgaagagcaaagtcttttgttcagatttttcggtgcttatttttttttaggtacatatgtttctataaggtattcttatttgcttgtagaaaacttagcatctgtgtggtaaaatttttctctcgcagattgtgcagattctatatggtttataattcttttaacctgtggtatttatttcaacgcatagatacagagattttctggttgaagttaagtcgtttcacttttaataaaacacagagcgttataggagggaaatgagtttcttttataaattctttaccatttcacattttccgtaaatagatgtttttatctggtaaaacgaaccgcagcgttacaagacggatggttctgtaacgctgcggttttagtaaaagattggtttggtaagaaatctttttatgttgtgctgtatttcaaatctttaaatttttgaaaagcattggcacaggctcccagtaatccggctttgttgcctaaatctgctgctacgatgctggtatgcgcaaaggcaaccggaatagcaaaggttttaactctttgggttagttcatcaatgtaaaactgacctgcttcgctgataccgcctccaataattactttttgcggactaaagatgttgacaaaattaacaattccggcagccaggtaatcaaaatgatgctccatggttcttatcgcatgattttctccgacaaggtatttatcgatgatggttttgccgtcaatattttcatctgcagccgtatcttgtgactgatagtatttgattaatgccgtaacagaggcataggtttccagacagccacgtccgccgcaattacaggcgataccattttgttgaattacggtatggcccagttcaccaccgcgatttttgaaaccgctatacaagcctttattaatcataatggcaccgcctatgcctgtaccaatcgttagaaaaacggcatcggtactgtctttggctgctccgtaaattaattcggcaagtcccattaagttggcatcattatcaattacaacatgatgtccggttaaatcctttagaattttacccaagggcaattggtcaaaaccgggtaagtttacgccaccgccaatgatcacatcattttcaatcagacccggaaagccaattccgatacccacaatgggttcttttagctgatcggtacattgtgtgatggcatcgatcattaagcggatgatttctttttcggtacgggcttcttttaaagatactataaacgaaaataaaatttctccgagttcattcacaacaccacatttcagtgaagtaccaccaatgtcgatcccaattgcgtaggattttgacagttgtgtatcatttttggtaaccatattgttctttatttttagtagttttcttttctgttacaaacaattaatgcagaacaaagtcctgcattaacggtcataaacttattcatttctaaataatgttgtatcatttatttttaataatttgagtttttcaaaataaacctcattatttagtgggttgtacatgatttttttcacttaagtcttacgcgatttattaaaagtaaaacgctttttttagcggtgtatactatggctctctgtgtaaaaaataattacaacaccttttttagggctatttgcctagtattttggattctgacgtgtgatgtttttgttcacgtctgtttcattttgtggataagggtacaattcatgttttccggccacaaaattggtaatcgcagggaagaaataagtcgatctgatttgtttgactgcggcacttgtttcgatcagtttatcagataaaattccccatcggatcaaatcggctcttcgcattccttcgcccgaaagttcccaggctctttcctgttgaacggctttcaggaaattgtctttgttcagaccggcaggcaaactcatttcggttgtggttggtttggtcaagagtcttgcggttgcagttgctccggtaccttttccgtctgtactggtaatggttacagttggaacagtggtataaccatcaccggaacgcagcattccaatagtatttacccctccggccgaaagggtgattactgccgctgctgcatcggtacctccaccgcctgtgatttgtattaaaacattggctgcattggtatatccgctaccttttgtttttaagtcaaccgcaattcggcttccctgtatgtcggcaccaaaggctcttttgcgaacctgattgatggcgtcgtaagcaatagtattagggccctcgtttagttcgttttctacctcagcacgcattagaagcaaatcggaataacgcatgattacccaattgatgtgggtataaacacgttccgccgttgcattggtctggtattctctgctccatttaccaacggtccatctttcgtcctgattggtggttaaaagcggaagtttgttccccagattgttgatagaataggtggcaatcgaaaaatctctgcgctggtcggccgcattaaaactattgtaaaatggttttggaactaaacatctcgaaatgttggatggatagaaaccagcagctgtagccggaccgttgaagtttcctacccaggaggcatttcctatgtttcctgacggattatagaaagcaacctgaaaaatattctctgtaggttctaatacatgctgacactggtttttaaatactttagcataagacgggtttagtttatacggattttgggcaataacatcgttaatctgttgctgcgccagtttgtaatagtctttgtagtttgcaggacgtttcatcgttccgtctgcacttaaagagttacctccggcaaaaagtgcgaccctggccaacatggctttggctccccatttgttgatacgttcgtctgtaggcagctgctccggaagcacaagtgatgcttcggtcatgtctttgatgatctgggtgtaaatttcctgacggtctaccagacctccttttagattgtctccagattgtgaactttttgttttaaaaggtacatctccccataaacgtacaagttctgaataatagaaaccacgaaggaattttgcttcacccaagtagcggtttagctgttctttttgggcagcatttccatttgaaaagagctccatttgaggaatacgttcgattactacattggctctgtctattccttcatacaatttactccaaacggtgtaaaacatattcgtttgagaaattccctgatagtgtgctatggttctccagtcatcggcaccaattccggtcatttgttcgatatcggtatcagcatcaaaaactaaggaaatgttccaaccatagctgtccagtgacgacatagattcgtaaacgccaagggtagccatattggcttcgtttgcattcgagaaaaagttagcagtggtaaagtaagaatagggggtaacttccagttctttttcgcaggaattaagaggtaataagaggcaggcaataccggctgctataagtattttgcgggaaaatatattgtttttcatctttgtaaactttaaattatagcgaaatatttagtcctgtgataaacgatttacttctagggtaagcactaaaatcgactccgcgggttatggcattgttgagtacgtttacctcaggatcgtagcccgaatatttagtgaatacgtacagattgtaagcggtaaaataaatcctcaaatttgagattttagattttttaagccattcttttggcaaggtgtacccgagactgatgttgttgattcttaaaaacgagccatcctcaataatatcgctgtacaaacgtccggtagcgtttccgttaaaggcaggattggttttgccttcgttaagcgcagccagttcagtaggatcggttacacgttgtcctgctgcgttaatggttgtccatctgtctgcataaatcgccagtgtgtttaagttgtcgagattcagtcttgaattgtttaatacgttggcattataaatatcgtttcctaccgtaaaatcaaggaatacgctcaaatcaattcctttgtagctaaaggtattgttaagacctcctgtatatttaggattggcatctccaatggcagttcggtctaaatcattaattacgccatccggtgtaccattaggaccgctgatgtctttaaatttgataaaaccgggttgtgcaacgatattgtcgcttactacacctggtttaagggtgtacgtgctagttgttgcattgtaattaaaatcgtttacctgatacaatccgtctcttacataaccgtacatgacgcccaccggttttccaacctgcagaatgtagtcgtttcgatcggtataactattggtgatcaatgaattttcgccttcactcaaacttagtactttagttttgttaaaagcaatgttgaaagttgtactccagttaaaactattggtttttacgtttaccgtgttcagcgtaaattcgattccgcgattggaggtggctccgatgttttgaaattgttttttgaaacctgaacttgccggcacacgggtgttgtacagtaaatccttagaacggttttcgtataactctgtggtaagcgcgattctttgtttgaagaaaccaatgtcaaaaccaatgttagccgattttgtagcctcccattttaaaaagggatttggaagattgttctgaaatgccgtgatattcatttgattgttcaaaggataagaccctgaattaaaaatacccaaagcagcataattggcaattcgattatttccggcttccccataactcaaacgaagttttaagtcagaaaaagcaggtaatttatccataaaaggttcttcgataattctccaggcagctgaaacggaagggaagtatccccactgattttctgtgccaaatttagaagacccgtctgctcttaaagtggcagccagtaaatatttgtttttgtacgagtaattggctcttccaaaaaaagatattattttatcatcttctgcataacttgtcggaattccggcaatggtgcccagttgtagtttatcccagcccagattaacatcaggaaaagcggtagccgaagcagtaattccttctgtataattgtagatgtactcttgtccgagagaagcatcaaatttatgctttttgttaaaagtcttactgtacgtcagaacgttgttgtaatttaatcgggtaccaatattgtgtgtcactccgccattggcaccaccacttctgatggcttgtatacctctggaatcgttaaaatatttgctcttcatgctattgtcggtataactgattaatccacgatagattaagcttggcgtgatgttgtattgcagctgcaaactcatgttgatggctctggtaatggcctctcttttttgactgtcgatggtaatcaacggactctggaatgttggagaatcctgattgtccaacggatctacggttaaggttttaagatcttcatcagatcccgtttttccaatggtcggcctgtactgtaacaagttttgcagcatgctcaaacgtgcatttccaccatcatttgttgataatccggttactttttgattggagtagtttacgattgcggtaaccgtaacctttttgctgatcgaattggttacgtttagttttgcgatattttttaccgatccgcttcccagcataatgccctgatcgttattcaccgagtagaaggcattgtatttggtatcattttcacctccgctaatgcttagcttgtggtattgactttccacggcatttccaaaaacctcatcctgccagttgatgccttgttggtctttgtaaaggccttcaagctgatcataagttccaaaagcactcacaaacttctgcattctggcatcatcagtcgctgattcataaagtaattgggtgtattggtaaggattcatcaccggaagggttttggcaatagtcttgatcccggcataagtgtcataacttaaagtgagttttcctccctttgcttttttggtggttaccagtacaactccgttagcgccttgggcaccataaatagaagttgaagaagcatcttttagtacatcgattgattcaatatccatcggatctaaaaagcttaatcctccggtttgagctacaccgtcgacaacatacaagggttcattgctttgtgtaatcgaagttccgcccctaattctaagggacggttcagatccgggtgtaccgtcagacatggtcacctgcataccggcaatacggccttgtaatgcctgtgccacattttgaaccggaattttagcgagttcctgtcccttaacagaagagatagctcccgtaagatcttttctcgctttggttccgtatcctactacaactacctcatccagattattggcgtcatcgagtaatttagtattgataagcgttctgtttttaacaggttcttctttagttttagttccgatgaacgaaaaaactaaaatagcatttgattttaccttaatttgataatcaccgtccatagcagtaacagtggtgtttttggttcctttttcagaaacagttgctcccggcataggcatattctgagcatcggttaccaccccttttacagtaataatatcctgcccgtacatcactttgcaggtggtaagcagcaaaaataaaaatagagtccttttcataattttttttaaaccggaataagggcaaccttacttcctaaattgatgttatataagttgatatctggtcttgctgcataatgagaaatcactcttctgaatcatttatcttcttcttcttattattgcgtgaccgaaattccgaattactgttgtaataagtttgagatcgactgccgtttgacattattgtttaaccaatcgcttcattatttttaatggacgaaaattataacaatttattaactgaggaaattcgcagaggaattttccgcctgacaattaaaaatagattctgtagttgctggttcatttttttggaattggtcatgttttttttgatttaataaaaacaaatatataaatcgactatagaggacagttttgaaaatgtccaaattgctattgattttgattaattgtacttttaaaaccctttgaaatccttgtaaaatcaaggttttatagtatttttgagattttgttttcagtaggaaagtgctgtttttactgcgctgttttgaaataatttgtgttgggcaaaagttaaattaagtggaataacaggttaacgaaaacgatgtaatttttacagaatataggagggaagtaaagcgatttgtcatttccttttcagataaaactgataaaagtgttgtgggtttttatttttttaggatagaaggaacaatatgtttacaataataccgaaaagaaacgtgcggattgttttttttatgggtcattcctacggaattcaaatgtcggggacgaaatttttgtagggatggattttaatccatccctacaaaattgaccgagccaaaggctctttttagtagttccgaaggaacggctcatattgtagcaacggattttaatccgttgaatgaaaaaggaagacaacgttggaattccgtaggaatggtacataccatccggtaattagtagctcccaaaaaaaaagcgtctaaattttagacgcctttacaatacataatattttgaaaggaattagaaaagcttaatcattcagatttgtttttacctcactttttttactatcaatttgtaaactcatatcaataattcccttttcgaaatcattagccttattcatcttaatgctgatctctggcgctttagttccgtcatacggataaactaccgtaataaaagtttgtgttgcagcagtggttttcggcttttcaaaaacaaaagccggacgtgcgatttctttggcatactgataggaaactttaccatcttcttcatttagggttactctatcggtatttaaagattgtatcaaaagattgttgccatcttcgtaagtggttgtaacactattgtttgttttgttgaaaacaggtttactgtcttcttttaattgaaagtgaactcctaagtttccggtagcttttccaattgttttatccaaaattaaaaagtacttctgatctataaaaagaatggtacgctggtggtttaaatcagtataacttggattggtataggtcaattgatctaagtttttagaggtactccatttgttttctttggctttggtaatgatcatgttctgattgtcaagtgtcaacgtgctgtgtactttggtttgacggtaccaatttctcattttggttacctcagcatcaccactgtaaatgtagcagcctgtatctggtgtaaaattgcgtccttttacccaaagttcaaacgtaccgttgtcgggctgtgcatggaattcggccggaggccccgctttaacaatcatgacggttgatttgtcgttccatccgtttctaaaagtatagaaacctccgtctgataagccatgggatccataattgggtaattgtccttcagcaccagctgtacccaaatatttcaggagtccgttttcaggaaacatttttgaccagtttagaaattgttttattctgccacttttatcaaaagtccaggagtcgccaaacattggtgtactgtaatcggggaaagaaatattggctgtcgccaccatcattttttcgattgttttggagtaggtttccggaaattctttagctacacccgccattttagccgagttgtaggcttttaaaaagatttcgatacaggcaacgtgataaatcggtgaaagctcccattgtacgccatcagggagtacttgtagttttatttcgcgattgagtatttcgatgccgcttttacgccattcttctgctgctttgagttccgggaaaaaggctcctgcactcaggatgcgctgtgcttcaaacaatagatgattgccttctttgctgtaattcttaggaatataagccgtctgtttggagaagctgtttaagaattccagtaaaaaagcgggtgtaaaattcgatgaaactacaaacaggttgaaggttcccggaagactttgtatacgctctgatacttctaacgggcgccaggcaaattggtcattttctttcgaacgtcctaaaacgttttttttctcccaatcgcgaaactgagaaacccattctttggcatatttttcatcgccgctgcttctgtaggccattcccataggctgccaccaggttacacgatgcagctgccagcgtacttcattgtcttttaccggccagtaatcccagttaatatcggttccgtaatcaaaatagccatagcctttgtgaggctgaaactgatgcaataaagcattatcggcttttaactgattggcttttccgatatcttttcctctaaatcgggtttcatcgcccacattaaaatcagggcttttgatctttcttcgctcgcggtaataattgagcaacgctctggcggcttcgtcatatttaccggaagtaaaaagctgatttacattctccaaacccggatagtgaaggttgacaacatcaaaactttctcttgtcagttgtttttcctgtgcatgagtaaaataagcggtggtaaatagcaggagtaaggttattgtttttttaagatttttcattagtatttaattattgttttttaaattccaaattcagttaatcgtttattgttttattaatttgacggttttcttttgtttgccctgacgtatttcggcaaaatatattccgggagtccagtcactgccgagaacgatagtttgtccatagtttgattttagggtgttgacacgttttcctaaagtatcgaacacatttacaaaaatagtctgtccggcttcacctgtaacattgatcttaaaatcggatagggaagggttgggagcaaccataactgctaaatctttagaagcttgctccgtcggatcatggatacccaatgtggatgattttacgagttcggtttgaatggtaagtccgttaatcgtagcaaaagtaacttctgtattagcaccattgatagtggtggttatatttgaagctggtgcgaccaattcccactgaccggcaagagttagctttacagggtctgtttgtgctactctgtttaaaatggagttttgactactgatctggctccaggtgtaggtttcattcgaagtcaaaagtcctaagtttggattggtcaggctaactttcaatttgttcccgttgtccgtcttttgagtcatcacagcggccggtttgtttacacttactactacatcataagtaaatatagtatttggagtaaaaatgacatacccaaatatggcatccgggaggtattgcacaatgtgtgcctgactgttttgatggtaaattttaaagtaagaagtaaaattagccgccagttgttgtgtaacggtctgtccgccctgcaatacgaccgcatattgaaatttggctgaaacaggggcagtaccatgattgatataggcactggtaaaattacccgaagtatttgcggtattgctgttgttgcgggagttttgctccaatcggttaatggttatcgcatcggtattacttgaatttccgggaaccacgtagccattgcctaaagcatctgtcgcccagaaggctcctgtttgggtaagtgtataagtattgcctgtagtggccgtaccgttaacataagttgctgttgctgtattggctagtgctgtttgaaacagagtagtatgaatagggtaggttccgttggtatccctgatattagaacccagacaaagaatcatatttttgaagaaaaaattagacttcaaagccgtcattccggtagccgaattataatctttatagtccataccaaaaatgccgttatggtctaaagaaccaaccgccagaaatgattttccgttcatctccctcatagtacccgtttcaaggatgtttaacggaaggtaggccacagttgttccgggaagatgcgaccaatcccagccattttcggaataaccgtttgaagctcgggtcacgggaactccggtggtcagcaattccatagcgcctgcagaggtatatctgccaaaaacattttctgtggccgaatcctcgaaatgccaaatgtgtttactcgttcctttgatgcttgcctgaaagccattgtatttgtgaacgctcaatccggcaaaaggaaaattaaattgtccttgggttatttcgggaagtggactaattcctgcatttaaagtttgcagcaggtccattaaactgccaggcgtatgaaccagtgtgatcgatagggcattttgtctcagtaaattagtattagcggttgcagaaaggttccaaaggcgaacaaattctcttcctgcttccagattggctacaggatcggctacaaataaaaatgccagtgcaggtcgtaagtcgttaagcgcatcagtgttggtgaagaatcttccggcaagtcctaaaggcatttcaaaacctttactgaatttgctgtagtttaaaatggcattttttaagttgctttgtgcttcggcatttaattcataggaggtgtttttcagcatcatgttcataatcgaagattgttgcaacgcttctactccgtaggaatttgaataagcacctctgtgatgataggtaataaaatcaggcttaatacaatcgttccagccgttgcttattttgagagcattgtcaataaatcgtttcaggaaatccatatcggtcacttttgtagttgaagcatcgtcctgagccagtacataacaaaatcgctgctgaatggaagaacggataatatcggaattaaaaccgggattggtgaaattgaaattcgggtaatccggagaaataaaaaccgttaagcttttcagtgctccgagatgatgtgtaaattctccggaagcaaccagttcgtctttcatcaaaaaaacggaagttgcataccctgaggagcgcaaacatatcccgtgaccgctggtaatcacttcttccgtggcaggaatggagagataagcaaaattagtagtactgctgatgcctttagctttcatatagttgaaaagtgccaaaatagaatctcgcagtgcagtgctgtggtagtcgggattaggactggcagccgaccctttcagctggtacaaaaagactaagcggatgagtttttgttcgaccaaaacctgatacgcagtctgatcggcactgacggtaaaattccatgccggaccaggattggaaaaatcgtatgccgagaggtttttggcagctataccattgcttagaaaacggctgtatctttcgttgacctgtggtttagaataatcgagattctcccctgtgagccagtttcgatatttgacggcaatctcatttacaacactcagctgagcgtacgaaaagttaaaaactaaggctattagcccgacagataaaaataattttttgtgcataagagtggttattaatagattagtggttagtaatttattgtattcttagcaactaacccgcaaaacttccaacggttagaatcggaggttttgcgggcttgtaatgaagttatttgattaggaattacgctgagaaaatactatcgcgagtaattttcggcaaactgttaattgttcggtcgagtattttttgtaattcctaaagtaaagaacttcctgttttatttttttcgcagacagcgtattgcacgaactgtttacttttagatttctatttttttaagagatgcgtatctttttaaagcttctagataataataatcggcatagtcaagtggtgtatcaatttctgaattgtataaaaaggcacccacgctgtgtttcagtaaaaaataattgttttcacccggtttcgcgagataagcatcagacgataaagattttaaaatggcttcggcatagctgatgtatttttttccatccttaacctgagtacttaaatcaagcaatgctgaggcaattacggctgctgccgaagcatctctgggagcaagttcagcagtatccagagcgttgtgaacatcaaaatcccaaaccggtattttgtcttttggcatacgcggatgattcattaggaaggcagcaatactttcggcctgttgtaaaaatttagggtttttggtattagcataacacatcgtatatccgtacaatccccaggcctgacctcgtgcccaggccgaatcgtcagtaaccccctgatgcgttccttttcgtaatactttgcctgttttcggatcgtaatcaaccaaatggtaggaactgaaatcttttctaaaatggttttttatcgtggtcagcgcgtgcgtattggcggcggtggcatattccggtttgctaaaggcgctggcactccaatacaaatattcaaggttcatcatattatcgataatcaccggataatgcaaccattcaaaatcccaggagcgaatagctcctactgttggactaaatcgggcgtaaagatttgctgccccgtcagccagtgccggaagataagttttgtctcctgtaattctgtaagcatttccataagaacagtacagcataaaacctacatcatgtgtgttttttatatttcgtatagaatctaaagcaagtgtgaattttttagcttcttccgccagaactttatccccggtgagttcgtagccataccacagacttcccggaaaaaaaccggtggtccagtctgtcaaacctgccagtcttaccgttccgtcaggatttacggaacgcggatttttcccaggtttgtaagtctgtgccgctttgtttagctggaagcgaatggtttcggttgtttttttaaaccaaaccaaagaaggatcttcttgtttgagattggcaaaggagtttatggtaatagcagagagtgctagtaatagacataatttttttttcattgtttactcttttagatttataatctgtttgttctaatgctttgatacagcgaagttagatttgagattcaaaatcgtctttcagtttttatcataaaactttcaaatttgtgtaaagagtctgttttttccagaattaatgaaggttttgacctgctcggtttatgcggcggcgtaaaaatgtgattttgaattttatgaaagtcaaaaaataggtttataggtgttgaagcattagccacagattaatggattaaaatgattagcaaaaatctgctaaccatagtaatagagaacaggcggagcaatttgcgtgaaaaattgatttaacacatagaaacatagtttttctatagcttaaaaagaatgtctaaaagaaatacatttctttcacatagagctatgtcttttatttaaagtgaaacgtcttattttaagttacatgatctatgtttctatgtgttagaacaattatcacaaaaaagaaggagcaacaaataatttagcacaacaggttacctatcgattaattacataattttgaaaataataaaccaacactatcgattcctttgagcaaaaatgccatacccactttgtctgttttaaatatacttggcgagccaacgtttggtatcaccctgtttcggcatagtgtaaaagggcgtaacgaattcgagcagcctcataaacacgatttttaccttgtttttttcgtagagaacggttccggatttcatagtgtagattttaaacaaacgaaagtagaagattatcaaattcattttgtaggggccggacaggtacacaattggtcgcttgatgtcaatacgaatggttttcagctgatgatttctcctgcgatcatgaccgttttttctaatttgtcgcagctgccttttttcggacagagttcgcctttctgtctttctctaaacaaaagcggttttcagaaaattaaaagccagctggaagaaatcgaaacagatttaattaaagatgatttgttgaccaaagaaatagtactgctgagattgcatctgctgtttaaattattgcaaaaagattacgtgcttcaatttccggatcatgatgttgcggccaaatcagaaaaaattataaaaaagttcaaaacactgattgaagatcattttacaacccaattctcggtgaatttttacgccggagagttgaatgtgacttctaattatctgaatattctctcccaaaaattcctgaacaaatcggctggcgatgttataaaagaaagaaccattctggaagccaaacgattgttgatcagtactgatttgtcggtaaaagagattgcttatcagttaggatttagcgataatggctattttgccaaagtgtttaaaaagtatatcggaaaaactccgaccgattttaaggaaaattataatctgtaccattcttatcattaatcttcctgctccggttttaaaaaaataagtgaattttgcagttcaccattatttcctgagcattagtttttcaggaatatttcacactattaaccaatgagcgacaacaaaataaaccgaaagcaatttttaagaatgggagccgcagcaacaggggctgccttgttttccggaataagcaatactgcaatagcacattctccggaagagcccgaaaagagtatagcctctgctaaagaatatattttaaccaatgtaagactggaagacggttttgagtacaatgaaaaaaaagaagtaattgccaccaaaaccaatttgtacaatgtgcatatagcggatgggaagattaaaaatattacaatcgacaaacctgatgggaaactaaaaaaagtagatgccaaaggtcttttgatgcttccgggattgcgtgacatgcacatccatattgataaaaccttttacggcgggaaatggaatgctgctcccagaaaaggatttacggtaaaagacatgattacgctggaacagaaaattattccggatttgcttgtggattctcagtacaaagcagagcaggctattcagttgatgaaaagtcagggcagctattttgcccgttgccaatgtaatattgatcctgtgagcggattaaaaagtctggagcatttgttgaaggctttagagaataataaagacagttttggatgggagattgtggcttttccgcagcacggaattttatattcgcaatcagaacctttactgagagaagccgcaaaaatgggggtagattttatagggggacttgatcctacaacggttgatggaaatatggagaaatcacttgacagcatgtttcaaatcgcgatagaccataataaaggcattgacattcatttgcacgaatcgcctccttcaggaaaatcggctatagaatacatcattaaaagaactgaagagaacaaacaattacaaggaaaaacctatatcagccatggttttgcattggcccgaatggatccgaaagatttagaaggaattgccgaaaaaatgggagcacttggaataggagttatttcgacagtgccgataggaaaaaccatcatgcccattccgactttaaagaagtacggtgtgaaactaatgacgggtactgacagtattgtagaccactggatgccttttggaacttgtgatatgctggaaaaagcaaaattatgcgcacagctttatggctggacagacgagtacagtttgagtcgtgctttgcacattgccaccacaaacgaggtgctgccgcttaacgatgcaggtgtacgcgtatggcctgcaacaggagatgacgcgcattttattttggtaaaagcaagctgttcagccgaagcagttgcccgtttgccaaaaagagaaggtgtgttttttaaaggtaaaatgatagcgggacagatcgccggattgtaaaaaaaattgaaagcgtatttcttactgtcaataggctgaccagaacagatacagttgtctgtgaaagaataatggtttggattttatgtttaatctgaattacaagcataaaaaaacaatcagtacacgtactgattgtttttttgtttgtaatcgattttgaacttatgacaggtgatacctcatcataaggatatagcgtaatttttttatatactatttaccatttgatgtacatactgccccaggaaaatcctgctccaaaagccgtaataacaagattatctccttttttgaaatcgtttttgaaatcccaaagacataacgggatggttgccgctgtagtgttaccgtatctttgaatgtttattttaaacttctcaataccaataccaatttcttcacttactgcctgaatgattcttaagttagcctgatgagggattacccagtctaccatatccggagtcaatgaagctttttccattagttctttcgaagtaccgctcatgtttctcacagcgtgtttaaaaacggttcttccttcctgatgtacaaagtgctgtttgttttgaatggtttcttctgttgtggacaaaagagaacctcctgcacgtacagaaaggaattcagcacctgttccgtctgttctgaaaatgttttgatgaataccgcgtccgtctgtagtaggttgtaaaagtacagcacctgcaccatcaccaaataaaatacagctgtttcggtcttcatagttcacgatcgaactcattttatcggcaccaactacgacaacatttttgtatctgccgctttcaataaagcttgcgcctaccgaaagtgcatataaaaaaccactgcaggcagcgttaaggtcaaatccccaggcgcttttcagtcctgctttttcgcataccaaactggcagcgggagtaagaatatgatcgggtgttgatgtggcgagtataaggcaatcaatatccagaggatttatatcataattttttattaaatctttaatggcgaaagaagccatatctgaggttgccagtgccgggtcatccaatattcttctttcttttatgcctgttcgagaggtaatccactcatctgttgtatctattcttttttctaaatcagtattgcttaaaaccgtttccggtacatatcctccaatagcaataatggaagcctttgttgtattcattgaattttttgtttctcttttagtgttcttttaattttgactttcggcccaaaacctttctccagcccattttacaagagtttttcgaagaatatgtagtacgaggggcatcttcatttacaggggcgcaatttaacaaatataaagacgcaaaaatctcgggatttgttaatttacttttaatatttctgtttcacttcattattaataaaatcaaatcctgttttgaatgattttgtttcagttcttcaatgtttataaaaaagcaatccaactgaactttttattagtcgcaataatgcttttttgttacagttcagtttaaaaaagtaaagaatatttaagatagcattcttttaataaatgaataagatttggtctcattcattgtcaaaagtgtaatatgaactaattaactcttgtttttataaagataattctatctttacggccagattaaggtctgttttttctttagagaaaacagttaaaagggaatcaggtgtaaatcctgaacagacccgctactgtaagttctgtaaaagtctttaacgttacttatgccattgtcccgctttgcgggatgagaaggctgtttaaagatggaacaagtcaggagacctgccggaatcacatagtttaagactttcgtggaataaagttgaacaacaataaacggacctgttattttgtaacgggatcctgccttattgcttttttgacgatcacatcccgaagtttatttaattaaatcagtgatgtgtaagaccagaaaattacttttatttcttttcgtattgttagctcccgtcgtacttcgctcacagactactaaggacagtctgagggttttgaaagaagtactgttaaaagcaaaaccttatcaggaagtgattcccgtacaaagcctttccggagtactgcttgaaaacttagccagccacaatgttgccgatgcacttcgttactttgccggagtacaaatcaaggattacggtggtttaggcggacttaaaacggtggatgtacgtaatatgggaacgcatcacgtgggtgttttttacgacggaattcagttgggaaacgcacaaaatggagttacggatttaggaaaatactctctcgatgatatggaatctctcaccatgtataatggtcagaagagcgaaatatttcagtcggccaaagactttgcagcagcttctactatttatttgcgcaccaaacggcctgtttttgagaataacaaaaagaccaatttcttacttcggtataaaaccatgtccatcaattacaatgatctttctttcagattggagcataaattaagtgataaagtaagctggagtgccagttctgaatacataaaatctaacggagaatacaaattcagatacaaaagaaacaatctcgacggtactgtggcctacgatacctcagccacgagacacaatagtgatattgaagcattccgtttcgagtctggtctgtacgggaaaatgaagaacggtacctgggatgccaaagtgtattattacggttccgaaagaggagcacctggagctattgtagaaaataaattttcggatggttttagacagtacgacaagaatttttttgcgcaggggacctttataaaagaccttagcgaaagatataaatttcaggctaaggcaaagtatgcctatgattatactcattatgtagccagagacaccaccaatgtactgggtgaagtggttaccgaaggcgctcaatctgatgatagttattaccagcaggaatattatttttcagcagtcaatctgtacaagattttacccacctgggacgtttcgttgtcaactgattttcagtacaaccgccttaatgcaaccagaaaaggtataaagaccctgttctcttatccggagcgctacaccgctttgtttgcgctggcaagttcctacagactggatggttttaaagttctgggtagcgttgtgggaacgcacgtgcaggaagaagtgcgttataatgccaaagctccagataaaacagaattcactcccgccctatttttgggttacactccttttaaagcgtacgattttaatgtaagagcttttgcgaaacgtatgttccgaatgcccacttttaatgacttgtattatacgatggttggttccagtaccttaagacccgaatacatgaatcaatatgaccttggatttacctacaacataccaatggagaaaggtttcctggatcagttttctcttcaggtcgatggatattataccaatacaaaagataaaataattgccgctccaactggaaatttatttcgttggatgatgaccaatatcgggcaggtgaagggaaaaggaatagagtcggctgtggatatgaaaatgcatttcggcaaagtaaatctgactactcatttaacctatacgtattcagagagcagagattacaccaagtttgccggtttggaattgtcctcttacggagatcagattccttatactccctggcacagcggatcaggaatattaaatgcagattataagtcatggaattttaactacagctttatatacgttggaaaacgatacaatggaaatgtaaacaatattaaaattaatgaagtgcagccttggtacacccatgatttggcggttcaaaaaatgttctcctttcatcagtataaaataaaaggaacgatcgaattgaacaatgcccttaatcagcagtacgaggtaatttataattatccgatgccgggccgtactttaaaatttataatcagtatggcactatgaaaaagagaagtacccgattcctgcttagtttatttgttgctcttcttttggtttcctgtagagaagaagaaactatttttccctcttcagataaaagtgttgccgcacccagaagcgatggcaacatagaaggattttatcttttgaacgaaggtaatatgggaatgaaccgcgccagtattgacgtgttcaattatagaacagggaattataccaccgatatttactccgaacgcaatccaacagtagtaaaagaactgggcgatgtgggtaatgatataaaaatttacgggagtaaagtgtatgcggtaatcaactgctccaataaagttgaggtaatcgacaaatggtccgcaaaacgaatcaaaaaaatagacattccgaattgccgatatgtcgctttctacaaaaataaagcttacgtaagttcgtattcaggccctgttgctattgatccgaatgccgaaattggatttgtagctgagattgatacgacatccttagaaatcaaacgcaaagtgaccgttggttatcagccggaacagatggtggtgcataacggaaaattgtatgtggctaattcaggaggttacaaagtacctaattatgaccgtaccgtatccgttatcgatcttgaaacctttaccgaaataaaaaaaattgatgtggggattaatcttcatagcatgcaggtagacagcagaggtgatatttatgtgagttccagaggcgattattacaacacaccgtctaatctttttgtgattgatacgaagacggatgaaaagaaaatgaagcttgatattcccgtttcggcaacctgtctggtcgatgatttactctactattacagtgtttcatggagctatctgaccaacagtaataaggttacgtacggaatattagatacaaagaccaaaaaagtgattaacgataaaatcattacagacggcactgataagcatatcatgattccttacggtttacaggtaaatcccgaaacgaaagaaatatacattaccgatgcccaaaattatgtagtgacaggctacatctactgttttactcccgaaggaaaattaaaatggaaaactacagccggtaatattccggcacatattgcttttataactaaaaagtgaagagtgaagagtgaagagtgaagagtgaagagtgaagagtgaagagtgaagagtgaagagtgaagagtgaagttgaaattgtaaaataatacttaaacttttgacgacaccttttaaaatagtttgcttattacttgtgttgacttttttttcctgcaggaaaaatgaattcgcgaatgctaatgacaaaatcactatttccttcgatggtaagtatttaaatggcaaggagaaagaaaaatatttagattccatatttaattttttaaaggatcagaataatgattctgttaccagaaatcttcattttaagctgtctacagaatattactataataaaaacccaaagaaatctctagcagccagtttagaggttttgagattatctaaagaggctgatgacaaagaaggaatcgcaaaagcattttattatattggcgacagctatggaaatgtaaaaaaggacagtgcttatttttattatttgcaagccgaaaaagtatattctaccttatcggattacgataatacgggacggatgttatttaacaaagcttatgttttgttttatgacggaaattatattgaatgtgaggttgaaatctccaaagctttacagtatttaaaagaatccaaagatcagcagttactttattgctgtaatgccttaatggggaattgcctggaaaagctggtcaattatgacaaagcattgtggtaccatcgtatggctttgaataatctggaaaagataaaactgaatcatattgacaaagatgaaataaccaattacaatgtaactgctacgattaatatttgtaatctatatgatttaaagggggaatatttaaagtccatagcaaaactacaaggtttactttcaagtgatttagagaaaaattggcctcgtttgtatgctaatgttctgagtaatctggcctactctaaaatgaaaatcggagaatatgacaatgtttatgaaatgttctccaaatcattagagattttgaaaaataaaggagatgaagcagatattttatataaaaagatccgcattggagagtatttcctcacacaaaaagatactgcgaaagcaatagaagttttaaaagaagccaatttgttagctactcgaattaagaacagtaatgaaattttaacttcattaaaactgctttctactctggataagaaaaatagcctctattatgcaaatgagtacattaatctgagtgatagcatcaatattgttcaaaaaaatgcacataataaatatgcaagaattgagtacgaaacttccagaattgaagatgaaaataaggttctgacgaagaaaaatttctatattttaatcctctcatttgcatcgatttttctattgctgattattgttattttaagatattccaagtataaaaataaagaatttcagttccttaaaaagcaaaagtctgcaaacgaggaaatctatttattgctgatggaacagcatgaaaaaataaacaatgcaagagataatgaaaaatccaaaattgcaaaagaactgcatgacggaattatgaatagaatttatggagtccgaatgaatctgggcttttttaattctaaggtagagaaggagataattgaaaaaagaaaggagtatatttttgaactgcaaaatatagaaaatgaggttagaatggtatcacatgatctgagtcacagttcttttttagatggtaatgacttcaatgttttactgttaagtttaatcgaaggtcaaaaggggattagtgatactgattttagctacacaaccgacgaaaattttgaatggtcagctattcaaaatatttataagatcaatttataccgtatcattcaggaagcgattttaaatatcaataaatatgcgaatgccacaaaatgtgaaattaaaattcagtttgaggctaatagtgttctaagaatgtctattactgacaatggtcagggatttgatacgacaactaaaaaagagggcattggtttgagcaatatgaaagaaagaaccagctcgctgaaaggtaaatttagtattgaatcacaaattggaaaaggaaccaaaattgaagtcctgtttactatccgggagcttgcttaaagctctaaaatgacaaaattttaacgatctccgtaaaagtccttatacccgacaggtttaaaaaaaacctgtcgggtttgttttacttattggtttttagaggattataatcgttttcgctttccacacagaaacagcgagtatttgatttattatcagtgtttgacgctttttaatatgaaagcccgtagtttttatttaaaaagtccgtaatttttatataaagactactactattttagccgtaaataaaatgtgttttaatttttcaaatccgtattaagaagagtattctcgtaaccgaggacagcgaagctattaaaaaaatggagtgttatttatgaagtcaattcacaatggttggtacgttttatatgttaaatgtcatcatgaacgaaaagtatttgatatgcttggatatctgtctattaaggcttttttaccaaccattcaggtacagagtacacgtacggacagaaaaaaaagtattcagaaattgcttttcccttcttatgtttttgtaaagataaattcctcattagatttttataaaacgctttccgttaatggggcctgcatgtacatccgttttggaatggagtatgccaaagtgagcgatgaagaaatgaggaaaattgaacttttgcttttaaataatgacgttactgaggtcgaaacgcatgttgaagaatttagtgtcggagattttaaaacgatctcttacggttccttaaaaggattagaatgtgaagtactaaatacaaacaacaccaataaaattgtggttagaattgattcgctgcagaaaaatatcaccgctacaattccatcctattatttgcaaaattaacattatggagcgtaaaaagcccggctttcgattatgatgaagtgaaactttgaataagaacgagctttttcctgcggatgagtaataaattaaatatctatagtatccatataattaatagaactatttccgatgaatgatttagatctattttgttaaaagacagttttttataactaaacagaattctcatacttttttcatcacagtttgaaaaagtaaatgtccatcaaattattagagttttaaatgacaaccatcgaacaaaaaagtatttcgaactattgggtaacaaaagttaagaataagcccctgatgaatagtgttaaggcagaaaacggggatagtaagaacatacaagttgataccgacaatctttcgttttttaaaaaaattacagctgagaatgcaatagcagaactaacggttttaattgcggtttacactgccttactgcaacgctattttgaagtagagagtttcatttttacgtcgaaacctactgatgctgaaactgcattattgtttaatagtatctccacatctggtcagtcatttaaggattatttaggggaagttaaaaaggaattacaggaagtttataaacattcggactatgacgatacattacaggaaaaatatccttttgctgaatatgctctttttggctttttctacaattcaaaatcagctcacacaaaaaataactttccgttttcagtatcagtaaacaaaaatgatacagaattggagttatctctttcctatgatgtttcgtttgtggaggaccatgtggcagctcattttttaagtacttatgcaaactggctgttgcaacttgagcattgtatgaatgattcggttgatcaaataccggttgttacttcgttggaaaaagaagaattgttaaactcttttaatccttcggtaaaaaaatatccaactaaaacgctggttgagttatttgaggtacaggcagcaaaaacaccaattgataccgctgttatttttaaagaaaaggaattaacttataacgaactgaatcagcacgcgaatcagttggcccattatctcagacaagagtatgatattcagcctaatgatttagttggaataaagctcgaacgaaacgaatctatagcagtagttgtattagggattcttaaatccggtgctgcttatgtgcctgtcgatgttaattatcctgaagagcgcattacctacatcgaagaggacagtcagtgtaaagtggtgatagatgaaaatgaatttagacattttcttagtcgtaaagacaattataaaacagacaatcctgagatactaaatcagtctacggacttagcctatatcatttatacttcgggaactaccggaaacccgaaaggggttatgattacgcatcagaatgcagttgttttactttattggtcccaggaggagtttaatgctgctgcttttgatgtggtctatgcggcaacttcttattgctttgatctttcggtctacgaattattttatcctttgtctattggaaaaaaaataagaattctggacaatgcactcgaaattggagaagcacttcagtacgataaaaaggtattgatcaataccgtgccgtcgagcattcgaaatacgatagaaagcggataccgtttagaaaatgctgcgatcataaatttggcaggcgaaccttttccggttgatattgctaagaaattattacagactaatgctgagatacgaaatttatacgggccatctgaagatacaacctacagtacagtttatagattagcagcgcaaaaagagtacacggcttcagtttcgataggcaaaccactagcgaatactcaggtttacctattggataaaaatttagaattagtccctgttggtgtagccggaaaattgtacatctcgggtgatggattgtcaaaaggatatttgaatcgtcctgaactaactgctgaaaaattcataccgaatccgtttaaagaggaatctttaatgtacgataccggagacatggccaaatggcttccggatgggactattgacttcctgggaagaaaagattatcaggtaaaattaagaggataccgcattgaattgggagaaattgaaaacgcagtgctttctttttcagaaaatattacacaagccgttgctctggtattacaaaaaaacggagtccagaatttagtggtgtatttcactaaaactaaagtgacagatcacgaaattttaaaaaattaccttaaagaaaagctgccagcttttatgataccgcattatttgattggcgtggataaaattccgttgacaccaaacggaaaaattgaccgtaaggttcttgaagatttgccgttgaatcaggtatccaatgcaaattatgtagccccgaaaagtgaaacagaaaaaacactgacgattatttggcaggaaattttagggatcgaaaaagtaggtatcgaagataactttttcgatttgggaggacacagtttaatgatcggtcaggtgatcaatcttatctacaaacagttggagggatctatttcttataaagagtttttcttaactcctactattgcacagataagtcaaaaaatacaaaaaggaggttataaggtaattcccaaagcgaaagcgcaggaatattacccgttaacctcttcacaacataaaatttgggtgctgagccagtttgaaggcggtaatagtgcctacaacatgcatggagctttaaaatttagaggagatttagaagtttcaaaactcgaaaatgctttccgtcttttaatcgctaaatatgaaattttaagaacctattttaaagcgggctatgatggtgaaataagtcagtacattttagaagaaggcgaatggaattttgcccttactcacgaaaatgatctgaataagagcacagcagagatttctcaatatttaaaggaacaacaagcggctatttttgatttgacgaaagcaccattattaaaagctgcactagtaaaaacagaagagaacgaacatattctttcactggtggtacagcataccataagcgatggctggtctttagaactgatgtttgctgagattgtagctgcttacaataatttggttcaggagaaaccggttgatttcgcacctgcggcaattcagtttaaagattatgcagcatggttacagtcgcaggaaaacgaagaagcgtttttagattcagaaaactattggttgtctgtatttaaagaagatattcctgttttggaattgccaagttacagaagccgtccggtcagacaaacttataatggtagtacgctttcgtatcaattttcggaggcctttttatcaaaattaaaacatttttcccagacgaataatgtgacgccgttcatgacgctaatggccggaatcaatgctttgttgtaccgctatacaaatcagaatacaatcgttctgggcactccgatagccggaagggagcacccagatctggaaaaccagctgggattatttttaaatacgttagcgattaaaactgaaataaatggaacggatagtttttcgaccttactagagctgcaaagaaagatcttaatcgaggcttatgagcatcagaattactccttcagcactttagtcaacaaacttaatttaaaaagagacgcttcaagatcggccttgtttgatgtgttggtcgtattgcaaaatcaggcacaattaaacactatatcgacccatgttccaatgttgggagttgagatagagccttatgaagtgaaacgaaatactgctcagtttgatcttagttttatttttacggagcaggaggaaaggctgttattaagtctggaatacaataccgatttatacgatgccttttggattaaggcaatcttcaaacatttcgagaatttgttgacaactgtatttacggatgcaaacgttacgattgatgctattgaatatgtagaggaaacagaaaaagaattgttactgaaaacattcaatgctactgaaatatactttccgaaagaagctactattgttgatctgcttgaagctcaggcagccaaaacaccaaatgattgtgcccttatctttaatgatgtacagttgacttataaggaactccacgagcaatccaatcaattgggggaatatctgagagaaaattatgcgatcagacccaacgatttagtaggtgttcgtttaaaaagagacgagcgtttgctcctaaccattttgggagtgcttaaatcaggagcagcttatgtcccaatggatgttaattatcctgaggatcgtataaaatatattgtagaagatagtaattgcaaagttgtaattgacgaaaacgaatggagtaggtttcaggtaaagaaacatcactatagtaccgaaaatctttcaaaaataaacagagccgaagatttggcttatgttatctatacttcgggaacaacaggtaaaccaaaaggagttttgattaccaataaaaatgtttcagcactcttgtactgggctaaaaaagaattcgatacagaacgttttgatttggtctatgccgtaacctcacattgttttgatctttcggcctatgaaatgttttttacgttatcagttggcaagactataaaactgctgagcaatgctttggagataagtaaagaattaaaaaccgataaaaaagttttactgaatacagttccttccagtatacgaagtctgatggaggaagatttttcttcattagaaaatgccagtatcatcaatttagcgggtgaaccatttccggtcgatatcgccagagaattgctgcgcactacagcagaaatcagaaacctgtacggaccttctgaggatacaacttatagtacctattaccagttagaaaaaggtaagacctataaaacaatcccggttggaaaacctatttccaatacacaggcttatgtattagacaaaaatctgcagcttacaccactgggtattgttggaaaactttatctatccggcgaaggagtagctctgggatatttgaataaagaagaacttacggccgctaaatttatcaaaaatccatttgttgaaggaagtattttatacgatacgggcgatatggttaaatggtttccggatgggaatattgaattcctgggcagaaaagaccaacaggtaaaactaagaggctatcgaatagagctggacgaaatagaaaatgctctcctgcaattttcagcagaggtaaaacaggttgtggtggcgataaaaccgtttaaaggcgctgatactttagtggcttactacacagttggtaatgctatttctaaagacgatttaaaagcctatctgcaaagcaaactgccagcttatatggtgccgcaatattatgttgaggttccttttattcctttatctccaaatggaaaaacagacaaagaagcacttccgaatatcgatgaaactaacgagacgaatagtggttatgtggaaccgaaaggacggattgaaaaaatagtagcacttatctggaaagatattttagcagtagagaccatcagtgcggccgatgatttttttaatttgggagggcacagtctcaagctggggcagttgattaataaaataaacgaacagttacaggttactgttccttttgaaaagctgtttgaatattccgttttaagagatcaggccgaactcataaagagatcgttctctaacaattttgaacctattgcagcagttcctgcggcgacttcatacgagatgtcatatgcacaaaaaagcctttggatggtcagtcagtttaaagggaatgaagtggcttataatattccggccgtatatcattttcacggaacacttgacattattgcgtttaaagaagctttctatcgggttatcaaaaagcatgaaatcctgagaactgtttttaaagaagatgacgaaaaaagtatcagacagttcattacaccatctgaagaatttaaactttcgattggatgcgaagattttagcgactttaatgacaaagagctgttacttcagcaggaaattaagcaaataagcaattttgaatttgatttgttcaaagggcctttattcaaggcaaaattagttcgtatcgattcccaacatcatgttttgttatttgtaattcaccatatcatatccgatgcttggtcattgcagcttctgatagaagagatcagtagtaattacaattcaatattgaaaaaagaagcggttctgccttcttctaaattagatattcagtacaaagaatacagtcattggctgaaagctcagattgaaacaaacgctataactagtgcttattggatgaaggaactgcaggggcatttaaaaccgctccattataaatatgagtatctgcttccgaatgatgttgaaaatcaggataataaaattgattttttcctgaatgccgaagtcaattcagccataaagaagatcgctaaaaagcttaatgtcactgaattttcatttcacttagctgcatttttcagttttctgcatctacaaacggagcaatcggatatcgtattaggagttccgtttgcgggaagggctcatgcccatctcgaagatcagctggggtattatgttaacctgctgcctatacgagttaaatttcatcagaatgaaaatttcgaaaccataatcagaggggttcagcacaaattatcaaaagcttttgagcaccaaatgtacccaatcgatttaatcctgagagatttagaatttgaaaggggagacagaggaaccaattttatcaataccggttttacctggaatgagcttactcacgatgaatttacaatcaatgaaaatcttaaggcaaaagcgcaaagtgtagctacagaacaggttaaatatgacttgtggataatttcaaacggttccggttttattctggaatacagaaaagaggtttttagtaaagacaccatagctctttttgccgaacgttatctggtatttctggaagaactgtcaaaaggcatagaacatgaaataggagcctacagttttaaaaccgaacgtgaaaaacaactggaagcttccagaatcaatatcgaaatcaatttttagtgatcctgtaaaatcaatacaacattcaaataaaccttttgtaatccctacaatataatcagactacagcatgaaagataagaaaatcatacaagattattggttgaacaaaataaagcaatacagtaacgacagcagttatttactgagcagatatgagcaagttccttccggtcagtatagcattgtattaaaaaagaacagtctggataagattgctaaattatcaggagggaatgccattgctgcggcaactatttatttgtctgtttttaatacactattaaaaagatatactaataacgaaagtatctgggtggcttcgtcccctttcaatttggagggagtacagcccgaaaaagatagcttgcttttttatcatactgctatatccaatatatcttcattgcgagatgcgataaacgcaaccaaacaggaaattgaagatactctgctttatgatactattgattttgagttaattgaaaaagagtttctaaatattgaattgactcctgaagattatcttcaatatgcttttgtatatcagaaattaaatcacagaaataatctattggctcaggccaaactttgtttggaaatagaagataccactgcgggtaaagaatcaattaccatacattttgatactgcgaaatacgatgcacttttcattcaaaatatggtggagcattttatacatatacttgaaaatagtagtgagctgattgatactaaggttgatgatattgaattcattacggcctctgaaaaacagcagttattggagttttcaggtgaatctgataagaagatcgacgcaagtgttatcgggatttttgaacagcaggtaaaagcaacgcctgacaacattgctttagtttataaagaaaaaaaatacacctatacagccgtaaaccgaaaagtgaatcatctggcgagtttattgcaaaaagagtacggaattaaatccggggatattatcgggatcatgactgattattcggataataccattttctcttttgctgcggcattaaaactgggggctacttatttgtctttggattataatcttacgacagaaagacttgattatatcttgtcggacacacagcccaaagcgatcatcactcaactcgagtatctgaacgacctgcttcattacgatatcccgttatttagtatagacgtcatgcttaatgaagaaaatatttccgatgtaaactgggaaaacaatagtacaggagatatcgcttacatcatgtacacttcaggatcaaccggagtgcctaaaggtgttgtggtaaaagacaaaagtattgtacgattggtgaaagaaaccaattatatcgaaattgatcctcaggaccgtattctggccatctcaaattcttcgttcgacggttctacttttgatatttggggagcattattaaacggagcgactttacacattccggagaaagatttagtgctcaattttgaactgttgtttcaggctattaccacaaatgaaatttcggttgtttttatgacaacggctttgttcaactccatggtggatactgacattgacagtcttaaaaacttgagaaaaattctttttggcggagaaatggtttccgtatctcatgtgcgaaagtttgtcaatcatttcggaagcggaagactggtacacgtttatggcccaaccgagaataccactttttcgacttttcaccctgttgaagaagtttcagaagaagcatcaggaatcccgattggaaaaccaatttcctatactcaatgttacattcttaacgagagtatgaaattacagcctgttggtattgcaggagagttgtatgtttcgggcgaaggcgttgcagcgggctacttaaaccaagaagaactgacctcaaaaagttttgttgaaaatccttatcaggaaaatgctctgttgtataaaaccggagacatctgcaaatggctgcctgacggtacgatagaaattttaggaagaagagacagtcaggtgaaaattcgcggtttcagaatagaactaggggaaatcgaacgaaagataacgagttacaatagtattaccgaagctgtaattctcgtaaacaaagacagccatgatgtgaaatttttagcagcgttttttattgccgatgcgactatcaatactgaagagcttcgttctttcctggcgcaaaaactgcctaattatatggttccggctcatattactcaggtgccgcaaattccattaaacagaaacgggaaagttgatcagaaagaattaaacaaactggcaaaatcaaataccgaaacgaccagagagcttgttttaccaacaaccgaaatccaaatagccctgcacaacatctggaaagaactgtttgataaagaagatattagtataaccgatgactttttcgacattggcggacacagtattaaggcaatgaatctggtgtcgaccattcacaaaaacttaaacataaaaatagatatcggaaacgtttttgaagaccgaaacattaaagcgctttcagaaacgatactgcaggctcaggaaaatgaatttcaggaaatagaagccctgacagagcagtcaaattatgcagtgtcatcatcgcaacagcgcttttgggcattgagtcagtttcaggaagccaacatagcctacacaattccaagcatctacaccttaacgggagatctggatcaaacggccttagcttttgcttttcaaacgataaccaaacgacatgaaagtttcagaaccacttttaaagaagatgaaaatcaggaattaagacaatttattttgcctgaagcggaaagtaattttgagattgatttcgttgatttttgcaatcgttcagaaaaggaattagaagaaaccattaacaatctcattcaggtagtatttaatttatcggaaggaccgcttttaaaagtaagtgtattgcaggtagaagaatccaaagcgatactggtagcagtgatgcaccatattattagtgacggactgtctatggaggtttttatcgaagaactgctgcatttgtacaaagcccgtaaaaataaacttgctgtagattttaaaccgctcagaatacaatacaaagattttgctgcctggcagaatgaacaactggagaatgaatcgttgcaggttcataaagcctactggacggagaaattctcaggcgagcttccggtgctcaaccttcaaaaaagtaaaattcgtcctaaaattaaatcctataacggcgaaacaattaccataaatattgatagcagaaccttaaaaaattttaaaaatatactggatcaggaaaacctgactttgttcatggggttgctaaccgtggcaaatgtcctgatttataaatataccaatcaggaagatattatactgggaactacgattagcggtagaaatcatattgatttagaggggcaaattggctgtttcattaacgtattgccattgcgcagtcagttttcacacaaagattccataattgatttattccgaaaggtaaaaaaaggaacacaggaagcttacgaacatcagatttatccttttgaacaattaatcggtgatttgaatctcacacatgatatcagcagaaatcctttatttgatgctacagtcgttttacaaaatgccgatttagatcaaaaattagaggttctcaatagtgaaggtcttgaaatagccctctatgaaaaaataaaagcaacggtaagccgatttgatatttcattcaattttgtagaaacggtaaagggactggaatttagcttagtctacaatacggatatttttgataccatttttattcgtcaaattcagaaacattttcacaacctgctgaatgccgtaattgcaaatccgcataattctattgcttccctgccttatttatcagtaggcgaaatacagctttttacctcagattttagtgccggaacctttaattctcaggtttgtctggacattgtcgaagcctttcagtatcaggttagaaaaacgcctgcgcaaatagccgttgtatataaaaaccaacaattgacttacgaggaattagatcgtaatgcaaacaaaattgcgcatttgttaaccacagagtatggagtgactaacggagaaaaagtcggaatcattttagataaatcagaacttttgatcagtaccatactcgggattttaaaagccggcggggtatatgttccaatcgatgtggaaagtcctaagatcagaaaagaatttattgttaatgatatcggcgcaaaagtcatcattacccagatggactatatgtttgatcttgacttttttgaaggaagtattatcgccatagacgttcagttagacgctttagaaagtcattctccggctccgcaaataacgaacagtcctgatgctccggcatacatcatgtacacttccggctctaccggaaatccaaaaggcgttttggtaccgcataaaggggttaccagactggttaaaaacaccaattatatcgattttgatagggtacacgccatcttgtctacaggttctgtttcttttgatgcctcgacgtttgagttttggggagcattgcttaatggtggaaaattggttttatgcgacaaagaagatttactaaacacaaccaaacttgcttccctaataaaaacagaaaaagtagataccatgtggtttacatcgggactgctaaaccagtttaccgatcaggacgtatccctttttgaaggattaatcaatgtactggcaggaggtgaaaaattatcagctaaacacatccgtaaactactggaagcctatccggaactgaaccttattaacggttacggacctactgaaaacactacattttcggcaacctataaaattacagcaccggtagaagaggatattccgattggtaaaccgatcaacaattctaaggcttacatcttagatcaaaatttagaactatgcccactgggagttgttggagaaatatatctggcaggtgacggactttcattaggctacttgaatgcagcagaattaaatgccgaaaagtttctgaatccgaggagtttgaatagagaacgagtgtataaaaccggtgatttaggattgtggctgcccaatgggaatatcaaattttttggaagaaaagacagccagatcaaacttcgcggttaccgaattgaactcaacgatattgaaaaaactttagatgcacacccggatatcaatggggcagtagtggtattgaaacaattatcagaagcagcagacgaaaaatttattgtggcttatgttaagtccaatcaggttatgaatcaaaaggagttaaaggcttatctggcagaaagacttcctttttatatgattccaacttattttatcgaagtcgaggatttcattttgaataaaaacggaaagattgacaaagaacttcttcccgagattgatttgtcgcaattagaaagagaatacatatcctaccggaatgaaacggagaaaaccctctctgagatttggagtgaaatattgttgatcgaaaagatcagtgtaaccgatgatttttttgaaataggaggacacagtttgagagccgtaaaattagccaatatgattcaggaaagttttggcgttgaagtgagtatcggacatgtatttcaattcagaactatcgaaacgatggccgaacagctcaggtttattcagaaacaagaagagctgacagcaaacaaaaaagaccttcaggaaatcgatatcgacttataatacgactgctttactttaataattgaaatatcctctgaaaattaaaataaaccaatgaaagacttaattgataaactacagggagaaggaattttactcgaactcatagaccataaactgaaggtttttgccgaaaaatctactattgctcccggtttaattgaagaaataaaaaagaacagagaagagttgactctttttttactgaacagtcaaaagctgcaggcatcaaaacctgtatggccagaaatactaaaaacagccgatttagagtattatccattatcttcttcacaatatagaatgtgggttttaagtcaaatggaagaatccagtaaagcctataatgttccggctttatacacttttgaagggaatctgaatgttaaaacattggagcatgcttttcagttgattatcgaacgtcatgaaattctaagaaccaggtttgtcaataaggagaataccgttgtacaaaaaataattcctgccgcagcaatacaatttcaggtagaagaaatagatctaagaaatcaaacaaccagcgcagaagaattaatcagcaaaggaatgtcctattcttttgatttagaaaaagagttgctgttaaaaagtaccgtttatcaaatagaagatcaaaagtggatattcttctttatgattcaccacatcatcagcgatggctggtcgatgggaatacttataaatgagttattagagaactacacggcattagaaaaaggagaaaatgttgctaaagaacccttaacgatacaatacaaagaatacgcagtttggcagcaaaaattatggagcgatgattattttgcagcacacaaagaatactggctgtcacagatttcgggtgaaatccctaaaatccagcttcctttcagtaaaacaaggccggttttaaaaacctataacggagataccgtttacagaaccataagtaaagaaataagcaccaagttcaagaaagtttgtctggagaacgagagtactttattcatgggattgctgtccactttaaaaatagtactttacaaatataccaaccagacagatttaattgtgggttcgccaatagcagggcgtgagttacaggtacttcacaatcagttgggactgtatttaaataccattgctttaagaggagtgattaatgctgaagacagtttcgaatcttttcttaagaacattaaagaaagcacgcttaaagcctataactaccaatcgtatccttttgataaattgatagaagaagcacagttagagaccgatttaagcagaaatccattgtttgatatcttcctgattttacaaaacaacgaaagtacgaacgtaaaaaatatcggagatcaattaactgttcaggctttagaaacagaaaacaaaaccagtaagtttgatttgcttttcaattttgttgaggtagaggaaaatttagaattgagtattgtttataataccgatttgtatgatacgttttttatagaacaaatcacggtacattttgagcatttattgaatctggtgagcagcactccatcagaaacaatagagaacctttcactggtaactgagagcgaaaagaaaaaattggttttagattttaacgctacacaattcgataatcaggtatgtgctccgttgaatgttttattcgaagaacaagtagagaaattagccaatcacacagcacttcgtttcaaagagaaagaatttacttttcaggaactgaacgaaaaagtgaatcagctggctcattatttacgcgaagaaaaaaacatcaaacaaggtgattttgtagtcgtaaaactcccaagaagcgagcaaatgattatcgcccttatggccatcataaaagcaggaggcgcttatattccggtagaaccgcaatatcccgaagaaagaatcaatttcattatagccgacagtcagtgtaaatttctaattgatgaggaaactttagcaaatatctcagaacagttggcttctttgcctaaaagcaatcctgaaaaccgcaataaagttaccgatctggcttatgtactctatacctccggatcaaccggaaatccgaaaggctgtatgattacccatgaaggagtaaccaacagaattgactggatgtggaacgaatacaactattcttcgacggacgttattttgcaaaaaaccacttttacctttgatgtttcggtatgggaaattttcatgcctttatgctggggaaccaaaatggtactttgcgaacaggaagacatttcagaaccgcatcgcattctgaatttaatccaaaacaatagcgtaaccagtctgcactttgtgccaagtatgctcaacacctttattacttctgtaactaacacagaacaattagcagacaaattgtctagtttacgtgccgtaataaccagtggcgaggctttaacaccattgactgttaacgaatggtacaataaagtatcgactgcacccatttataatctttatggcccgacagaagcttctatagacgttacgttctttaatactaatgtgggcaatgaaataatcccgattggaaaaccgatctggaacacacagatttatatcttaagcgagtccgatgccgttcagccgattggtgtagcaggagaaatttgtattgccggaaaaggactggcccttggttacctcaacaatccggagttgactcatcagaagtttgtagcgaatccgtttgaacccggagcaaaaatgtaccgaaccggagatctgggcctgtggctgcctgatggcaatgtagcctatttaggcagaaaagattttcaggtaaaaatcagaggattcaggatagagctggaagaaatagaagcggcattaaaccaacatccacaaatacaaacggctgtggttttagaccatactaatgaaaacagcggagataaatatctgacaggctatattgtagcaaatggtgaattggtgaaggaagaactcaacttatggctgggaactaaacttcctgtttatatgatcccgtcaaattttgtggtagtaaatgaaattcctttaaccaacagcggtaaagcagaccgaaataaactgcgccaaagtaacggactaagcctaaaaacaaccattgcctatgttcctgcacagaacgagctggagcaaaaactggtagtaatttgggaaggaatactcaatcagaccaagattgggatactcgaagatttttttacactgggcggtcacagtttaagtgctacacatttggccaatagcattaacagagaattcaatgtaaaaatcaatctgagagatattttcgaaaacagaaacattcaaagtctggccaaaaaaatagccgggacaactacgagtgtttatcaggaaattaaaaaagtaccggaaagcagcagttacctgctttcgtcagggcaaagaagattatggctgttgtcgcatctggacgatgcaagtatagcgctcaacatgtacaagacttttacgtttaccggtgtattggatatttcggtatttgcagcagcttttttggctcttctgaaaagacatgaaagtctgagaacggttttcagactggacgaaaatggtatcgtgaagcaatacattaaagcctttgatgaaaatttactgaatttaacgattgaagatttcagaccaaatcaatattctcaggaggttattgatgccaaaatcaaccaggaaatcgacaaaccttttaatctggaagaagatgctttgctgcgattgaaattgtatcagatcaaagacgatcaatggatgttttcttttgtaatgcatcatattatcagtgacggactttctatgaatattttgacgaaagaatttgtttcgaattatcaaaatctatcccagggaaaagcaattacagctccggatttaaaaattcagtacaaagattatgcgcaatggcaaaccgagcagtttcagtcggaggaatataaaaatcagctgcagcactggttaaaaaagtttgaaggagaagttccggtattagattttccaacagataaatcaagagcagcaatcaatgcatatgacggagattccgttgattttacaattgagaaagagactttttcaaaatttaaaaacttctgcgagagccactcgattaccgtttttaccggacttttatcactggttaaaacgttattatacaaatatacccaccaacaggatattaccgttggtacgcctatcggaggcagaatacataccgatttagaagatcagattggactttacatcaacactgttcctttgcgaacggtattcaatgaagatcacgattttatcagtttactgcatcaggtagaacaaagtgtcatcgatgcacaggaaaatcaaatggtcgcttttgacgaactcgttcttaatttagatcttcaattgagccgtaaccgccatccgttgtttgacgtttggtttgtactgagagacaattcaatagaagccgataaacaagcactcgaaatagatgatttgcaaatcgcagaatacgatgaggtaaccctgaaaaaatgcctgttcgacttagtattcaacttcatagaaagcgaaggacagttagaaggaaaaatcgaatataaatcaggattgtacgttagagaaaccattgtgaggttaatctctaacctaaaagtgctgttgcatcaggtactggtaaacgcagatcaaagtttggcggtattaccatttctgaatacggaggaagaaaatttactacttcatgtctttaataatactacaaaagattatagcacgcagcccgacagcttaattggtttattccaaaaacaggtattggaaacaccggagcagactgcattggttttcgaagataaaaaaataacctatcaggaattggatgaggtatccaacaaactggggaattatttaaagaaaaaatacggcataaagccaaatgaatttgttggcgttaaattagaccgaagcgagtggaatgttatttcattgcttgggattctaaaaagcggaggagtttatgtacccattgatattgcttatccggaagagcgaattgactatatcattgaaaacagcgactgcaagctggttatcgattcagatgaaatttatgatttcggatcgatggaaaagctttacagcagtgtcatggaggaatcgaataatagtgccgatgatttggcctatctgatttatacttccggttcaaccggtcttcctaagggagtttcgataaaacagggtgccatttcaaatacgattttatcacagatggaaatttttggaaatgaaaacaaagaaaaagctcttcagttggcctcgttttcatttgatgcttcgatttcagaaatctttacggttttggcttcgggcggagaattgcacatcataaccgatgaggtaaaaaaagacaccgaagagctggaaaattacatcgaagaacacgcaattcatttcgcaaccatttctccttcttacctgaaattattgcagctggacaaaattaaaagtttaaaaaagctggtaactgccggagaagcagctcctaccgaagaagttaaaaaatatttgacttatggcggtacctgttttaatgcctacggtccaacagaaaccagtatttgtgctacgatttataaggtgaatgaaaatgtgttacaggaactctctaatgttccgatcggatttccaatcgccaacactaaaatttacattcttggaaccaacgaaaaattgcttcctcttggagccattggggaaatttatgtaagcggagccggtttagccgaagggtatttgaacaagccggaattaaccaatcagaagtttatcgataatccatttgcggaaggcgaaaaactatacaaaaccggtgatttaggaaaatggctccttaacggtacgattgaatatgccggacgaaatgacgatcaggtaaaagtgagaggatttagaatcgaactgggcgaaatagaaaccgttatcaaagagcacgaagcaatcgaagatgccgtagtagtagtgaaagaagacagtttaggaattaaagaaaccgttgccttttttgtgctaaaagccgattcggtttcagataacgatgatattaaagaatttttagaagacaaactgccggaatatatgattccgtctcactttataagcttgaaagaatttccgctgactctaaatggaaaaacagacaaaaagaaactgttgcagaacaagtctttaaccgaaaatgtttcccgaaactacctggcgccccgagacgaaacagaaagtaaacttgccacattatgggaagaagtgctggaaatcgatcaagtgggagtactggacgacttttttaaaataggaggtcacagtttaaaagccacttatttaatcacgagaataaaagcggaatttaacgcaaaactcgatctgatttcgattttcaataatgccactttaggagaaatggcagccgaaataaaaaaggcgcagctcgtgaatgcggaagtcgtgattacagatgattttgaaaatatctccctataacctaatcccattttttaaaactataaaataaatctaaatggctactccaaaaatatatctgaaaaataacgtacaagtagaaccgttaatttcaaactggtatgcatggcaccacattatcccgccaattctaacgggatttaatgtggtaaaccgatacattccgattatggaatcgtatatcaacgacccaagcatacatgagactgccgtgaaagatcctgcttttagaggaggtccttttatcgatttagacaaaaaacacgttgatgaagtagcagctttgttggaaaacacaaagaaaatggcagccccgctttttgagtttacagatgccgtaaaagaactggacaaattgcttaagaaaaaagcaaccggacatttgatgcaaccgctgtataaagaagttccatcggcaatcagagggtatgtcgaattgtattatgacagacatcacagaccggatttcaggttttacgagcctcttatttatgccagtccgtattatgtagaagactttcagacggtgaagctgtctttaattaataaggatgccgaccggccttttattttctcaaccccaagattgtcaaatctggaagcagcattggaattaaaattaccttttaaatcgaaacaaatcgacgagttgttcaagatgaaacgcgagcctcaaactttcgaatacatcaaagaacttttgaatattgatcaaaacgatgaggcactttttaaaaatttatttactacagaagagcctaaaaagtatgaaaaatataccggagacagtatgcgcatccgatacttcggacatgcttgtattctgatcgaaaccaaagaacactccattgtgctcgatccggttttaagctatacttacgaatctgatgtgtcccgatttacctatgatgatttgccggacgaaatagattatgtattgattacccacggacaccacgaccacatattgatggaaacgatgctgcaaatacgacacaaagtcaaaaatatagtggttggtaaaagcataggcggtgccattcaggacccgtcattgaatttactgttaagaaatctgggatttgagaatattatagaattagaagaattgcaaaccatttcggctatcgatggtatcaaaattaccggaattccatttatcggcgaacatcatgacattcacatcaacagtaaactttcctatcacgttgaattagacggttattctttattggcagtagcagattcctgcaatcagtcgccggaattgtacgaacacattcatgaaattattggggatgtagacgtgctgttcatgggaatggaatgcgacggtgcaccagcttcctgggtgtatgggcccatttttaccaccaaacaagaacgcgaaaaagacttcagccgaagaggaagaggcagtaattacgacgaaggaatcaaaatggtaaactgctttaatgttaaagaagtttatgtgtatgccatgggagaagaaccatgggtgcgacacattttggatgttgaatatacagatgaatccaacccaattgtgcaatcgaacatgttgatcgaagactgcagaaacagaggtatcgtagcagaaagactatttgccgaaaaagaactgtttaaacaagcggtactgctgtactaattccctttaaccctccccaaaacaaagactactatccatttattttcttaaataattcatcttatggcatcagatttatatttaaaattaaaagaacaaaacattcacattgacgtaaaagacgataaccttgacattaaggctcctgcaggtgcattgactcccgatattattgacgagattaaaagaaacaaagccgatttaattcgttttattaatcaatacaaatacgacaaagcagttgccattccggaagctgccataagccccgatgcaaaatatgccctgtcttcctcccagttacgactttggattttaagccagtccgaaaaaggaaatgtggcgtataattcggttggaggatatatttttgaaggcgtactggatcaaaatacgttaaatgaatctctgaaggaaatcgtatcgagacatgagagtctgagaactgtttttgaagaagacggtaacggaggagcaaatcagattgttaagggaatagaagcaatcgatttttcaattgaacatgcggacttacaaaacgtttcaaatgccgatgaagttttaaaagaacaggttgccaaagaggctttgattccttttcacttatcaaaaggaccgctttttaaaacgaagctttaccagttagcgcagaacaaatgggcttttatttataccatacatcacattattgtggatgctttgtccatgaatattttcattgccgaaatactggaactctacaattctaaaaagcaaaacagagcgaatgcattaaatgcgttaagaatacagtataaagattacgccagttgggaaaatgaacagcttaccggcaaaaaatacgaagagttaaaaaactattggctcgatcagtttcagggtgagttgccggttcttacgatgccggtggataaaaaaagaccaattctgcaaacattcaatggcggaacagtagaaaaaagaatcgacgccaaattatcagtagaccttgaaaaactgataagagaaaacggtgccaccatgtttatgggattaaccgccgtaattaatacgttgctgtataaattttctacccaggaagatatcattatcggaactccggtttcagggcgggaagacgaagatctgcaaaatcagattgggtattatggtaacacgctggccattcgaatgcagtttaaaaaagaaaatacttttttagaattgttagaatacaccaagaaacaggtagtaggtgcatacgagcatcaaatgtttccttttgcaacactcgtgaaagagctaaacttaaaaagagacccaagcagaaatccgctttttgacgttcaggtgatctacggagaaaatgacaattctaaaaaaagcgaaagtttggaaggcttgcaagtttgggaatatgaatttgaagaaaaactaaaaaccagccgttttgatatggttttcagtttctacaaagacgggaaccatttagtgcagaatattcagtacaatacggatgttttttcagaaaaaatagtacatcagattgcagatcatgtttcggttatcatgaattctattgtaaagaatccaaaggaacaaatttataaattagaacatatcggagaacagcaaaaagaagcacttctgcaactttctaaaggtgatgttctggcgtatgaccaaagcaaaacaatactcgatttatttaaaaagcaagtacaggaaaaacccgaagctatagcagtggttttcaaaaataaaaaaatcacctataaagcgctggacgaagcatcgaacagattggccaattatttgttagccaatcataccctcaaaaagaacgattttataggattaatgattgataattctgaaaatgtactggtttgcattctgggaattctaaaaacaggaagtgcttatgtgccgatcgatccggaatatccaaaacaaagaattcagcatattattgaggacagcggattaaacgttctgctcacgcaatccgattatctttttgaccttgatttttatacaggagagttttttgccacagacattcaaatggattcgattgcagccgaaagtactgcattcgtgatagaagtgaatcctgctgatgcggcctatgtaatttatacctcaggatctacaggtaatgccaaaggagtcgttatcaatcatgaaaatttaatgttttctactatcgcaagactggagacttatcctgatgcaacggcatttttattactgtcttcgatctcatttgacagttctattgccggaattttcgggacaattacgggaggagctaaattggtttttgctcctaaaatcagagtttcagatgtcgatactatagtagatattctggtagaagaagaggtttctcacttacttacggttccctcttactatcaactattgctgaaccagttaggagagcatccaaataaattaaaaacagtaattgtagcaggggaagaatgtaccaaacagctggttgatctgcatcagaaggtgactacactaaaaaactgcaaactttttaatgaatacgggcctacagaatgtaccgtttgggccagttattatgtgtatgaaccgtttgcggaatttattccttctatcggaaaaccaatagccaacagctcggtttacattctgaatgataacaatgaattatccattgacggtctgattggagaaattcatattgccggtaaagggctttcaggcggctactggaataatccggagctttccaaagaaaagtttgtcgataatccgtttgaaaccggaaccaaaatgtacaagacaggagatttggccaagagattttcagatggtaatattgagtttttaggtagaaaagacaatcaaatcaagataagaggaaatcgtctggaattgggcgaaatcgaaaatgcgcttttgaattttaaaggcattaacggagcagttgttacctacagtgaaggtactttggtagggcatatactaaccgatattgtaataaatattgacaatcttaaaaagtacctgaaagaacaattaccggtatttgcaataccaacaagctatacacagtccaatgaatttccgttactgccgaatggtaaagtagacaaaaaggccttagtagttttagccaataaacataccttaaagggggactcgtatgtaccaccttctaatgaaacagaagctgctttggtacatgtatttcagcaaattctgcaaaaagaaagcattggtacagaagatgacttttttgcattgggaggagattcgataaaagccatacagattatctccaaattgaaacagcttggttttgtattaacagtacaggatgtcatgcaatttactgccatacaggaattagcacttcatgtaaaactggcaaagcaggagatcgatcaaaatgcagtagaaggaaccattccgcttacgccaattcagaaatatttctttgaggtgacttcacagcataaaaatcattttaaccaatcgatcttgctaaaatcatcgaagtctttgtctgaagaaggattgacaaagatctttcaaaagctaaccgtacagcacgatgttttaagagcggtatttaaagaggaaggcaacgaatggattcaggaaatcaaaaatgatggatttgaattccaactgcaggttcactccaatgttactgcttctgaatttgagaccatttgcgatgggtatcaatcttctttcgacttagaaaaaggccccttgtttaaagcagttttgttcaaaagagaagatactgattatttgttgctgctttctcatcacctggtgattgacggtgtttcctggagaattattttagaagatttaatgactttatacgggcagtacgaagcaggagcagcattagaattacctctaaaaacacattcgttaaaatactggcaggaaaaacaactggaatatgccaattcaatgaccatgatggaagaagaagtgtattggtcttctataaacgaagcaacacagttcagtacttccgaactcccaaaagattttgattatgagggcaataatttttataaagattttgaaacaaaagtatttcaactcgatctaagcgttaccgaaaaattattgacagaagcacacaaagcttataaaaccaatataaacgatgttttaattgctggtttatcgcttgcaatcggtaaaaattttgatatcgataaagtagcgattcagctcgaaggtcacggaagagaagatattaactcagagatagacatcaccagaacggtgggttggtttaccacgatatatcccgtactcatcactcttaaaaagaaacaggataacattggtcaattaatagaagtaaaagaaacgctgcatcgaattccaaacaaaggcattggattcgggattttgaaatacttaaaagactgcgaattaaatgtaaaagcagatgtttcctttaactacctgggtgattttgatttaggacaatcaaacaaagaagatcaaatctttcagttcaccgatattccaaaaggaagagaaatagcagccaataccgaaagaacgggaacactggatgtatcgggaattttagtcaatggccagttgcagattatgctttcatttaatactaactatttcagaaatgaaaccatagaaaacttaaaagaagcatataaatacgaattggaatctttgatttccagtctttccgaagaaaaagaaactcatttaacccctgttgatttcacttataaaggtttggacctgagcagtctggaagaattaaacaaaatgctgtaaccgtactactaaaaaagctatgaaaattaaagatatatacccgttaacaccattgcaggaaggaatttatttccattggaaactttctaaatcaatgtattttgagcagtcatcttataaaatacaagctgaattggagatcaattatcttaaagaaagttacgatcagctgattgcaagacatgatgtgctcagaacttgttttcgggataatgtaggggaagatcttttgcagattgttcaaaacgaagtgccttccaactttacttttctggacattaccggaaatacaagcgaaaccatagccgcagtaaaagagcaggatattgcaaaaagctttgatctgactgtaggttcacagatgcgtcttaccgttgtaaaaacaagtgaaaacgagtatgaattaatttggagccatcatcacattatcatggacggttggtgcatcggtattttgattggtgaattttttacgctttatgaaggtttacttcaagggaaaagaaacattttaccgaaagcaacttcctattcagactatgtgaaatggttgatgaaaaatgacaaagaaaaatcattgcaatactggaaccattatctggaagattttcagggcttaagtacgttaccttttccaaaacagcatacagaaacttttagtccgggagaaattttttataccattagtggaagtttaagagaaaaactggctgttttgtgtcaggagaatggtagtaccgaaaatgtcttttttcagacgatttggggaattttactagccaaatacaacaatacaaatgatgtggtttttggtggagtagtatcgggcagacctgcagaaattcatgatgttgccaatattatcgggctttttatcaacaccattccggtaaggatttcatttgacgatcagactaccgtaaagcaaatcttattgcagacacaggagcaggccatacaaagtttgccttatcattatcaggccattagtgacatacagcgcagcgtaaataacggtcagtcgttgtttgatcacatcattgtttttgaaaactatatagctgccgaagtgatagccgaaagtgaaaaaacaaatataaaattgttagaagcggcatcttatgagggagaaaactatgacttttcactggcaattgtaccaggaaaagacatcagtatccgtttcacctttaacgccaaaaaatatgatgaaagggatattacagcgcttaaaaatcattttgaacaagtcgtacatactatagcagaaaactttgatattccggtttctgaaatagaacttttacaagaatcagaaaaagaagccgtattgtctttgtccggtcatgacatgctgaaagaagctgctgcagaatacactttggtggagttgtttgaaaatgtggtgcaggagaatcaggatcagattgctttagtttatggggaagagcagtacagctttaccgggttaaatggaattgcagatcagtttgcggactttcttatttcagaatataaagtacagcccggagattttattgccatgcagctggatcgaaatgactggctggttattgcgctgttgggaatcttaaaagccggtgctgtatacgttccgctgcatattaatttgccacaggacagagtagattacatattggaagatagtaacagttcgattgttattgatgaggactttatcaatcgtttcaaagtacatcctaaagcaaatacgacgatctcaaaggtcaaaatttcaccatcagatttagcctatcttatttatacttcagggtcgacggggaaaccaaaaggagtgcttgtcgagcatagaaacatttgtgctttgctggtcaatacaaaaaacagttttgtcatttctcaaaagcccgtactgcctttgctggcctccaattcgtttgatatttttctttttgaattgtttcatcccctgctggcaggaggaaaagtagtgatggtatccaatgatgaaataaaagacatggaggatctttcaaaaattctcagacaaaccaatagttttcatgccgtaccaacgctgatgcgagcggttattgatcatataaaaacgaacaatacccagcaatcctatccccatatagaatcgatttttataggaggagataaagtacctgtcgggattctcgaagaaataagagaagtatttaccaatgcagtcataaacgtactgtacggtccaaccgaaggatctatttttatcacctctgaaagttacttgcctaacgttaaacaatttccaaatgcggtaataggacaaagtaacgcctgtaatgcaacttatgtactggatgaacatttaaaactatgtccgatttacagcataggagaattgtgtatttccggaaatcaggtaacaagaggttatctgaaccaggaagaaataactgccgaaaagtttgtggtaaacccctttaagaccgatgaaaagctgtacagaacaggcgatatggtcaaaagacttccaaacggcaaaatagaatttgtcggccgtaaagacaatcaggttaaagtaagaggatacagaattgaattagaggaaatagaaaatgctctattgtcaaatgaatacgtagattttaccattgccaaaaccattacagtctcaggcgacgagaaagaaattgtagtttatttaaaggccacaaaacaaatggatgcacaagagctggtacattttctgaaaggaatattgccttcttttatgattccggattattacgtacaattagaggagattccattaacggtaaacggaaaagtagatgctaaaaaactaccgaatcctttagataccaatgtcgtaaggaaagcagattacgttaagcctgtaacggagaccgaaataaaactaaccgaaatatggcagcgcattctggaccgaaaagcggttggaattcaggacaacttcttccatttaggcggacatagtttaaaaatgattaagctgtccaatcagatttttgtgaatttcggcatgcaccttaacataaaagaaatatatattcatcctactatagaagaacaggctgcctatattgatcgctctttaaacagctacaccctaacaattccacaggcagcaatagcaccaagttatcctttgtcctcttctcagtatcgaatgtataatatatgttctatagatgctcaggtaaatagagcttataatattagaataatagatattaaaaatgaagccgtaaacttagaattttttacccaagcagtatacgatttaatagagcgacatgaaatcttaagaaccgcttttgttaccaatgaaaatggtgaaccgggacaaaccatcattccgatcgaaaaaacagaacctttaaaaattcaatatttggatttgcgtaacagcgaaaccttagaaaaggatttacaaaaagcgcttatcgaaacagctgatatctcttttaatttagaaacgcctcctctgatgaaagcagcattgataagcgttaaagaagataaatggatcatcagtattctttttcatcatatcatttttgacggatggtcaactgatgtttttgtaaaagaactgtacgccttatatgaaaagtacagcgaaaacagcgcaattactttaccgcctttagccatacagttcaaggattatgcagcctgggagcaaagtatgattaaaagtgatgcaattgaagcagataaaaagtactggctgaaacaatttgaaggcagtttgccaatagtaagtgaattgggagatcaaaaaagacccaacatcaaaacacataacggcgcagtacgatcaaaagttctggaaggcagtattttgaaagacctaaacagcttatgtgagaacgaagaagtttcgcgtttcatggtctttttagccgtaaccaatattttaatctataaaaataccggagatcaggatatcatcacaggtagtccaattgtaaaccgcgactatccggaactgtttgatcagattggtttttatgccaataccattccgttgcgaacccatttaaatgaaaacgcttcgtttacagcaactttaaaacaagtaaaagagaatgtaatcaaagccaaagaacatcaaaaatttccacttgatgagttaattaaacttttagacattaaatacgatgccggcagaaatccgttgtttgacatcatcgttaccgccagagaagaaaacaatcaggcatcagatttagagtcatatgatgcgattattgatgctgtaggaaatggaatctctgccaaatttgatttgacgttcgattttttagtgaccgattcgacacttaccctaacattagaatacaacactgatatattctcttcagaaaaaatcacggcattgcttaaccatttagagcagatattagtacaggttacccaaaacggagaccaaaaaataagtgcgatcgattgtttgacagcagcagagaaaaaacatttactggaagaattaaacggtcatcaaaccgcgtatccgaaagattcatcgattatcgaattgtttgaaaagcaggtcgctctgacacccgaaaaaacagctctggtatacaaaaaacaaaagtacacctatcaggaactcaataatgttgccaatcagctggccaattatctggaagaaaattacaaagtaacaggagaattggcggccatttatttgccaaaaaatgaatggcagatcataagcattttagccttgttaaaatcgggttgtgcttacgtacccatttcggccgattatccgcaggaacgaatcagttacatcattaaagatgcgaatgccgaatgcctgattgcggcggatctaatcgaagattttgtacaatcacaggctaattattcgtctaagtttgaaagtatttatgcgaaagcaaacgatctggcttatgtcatgtacacctccggttctaccggagagccaaaaggcgttttaatagaacagcaaagcgttgtcaggctagtcaaaaacaacaatttcatacaccttaccggagaagaagtattactggctacaggagctttttcgtttgatgccagtactttcgagtattggggaatgcttttaaacggaggaactctggtcatttgcgacgaaaatacactattgtctgtaagagggatgaacgaggtggttgcaaacgaaaaagtcaccatgatgtggtttaccgcaggctggctgcatcagttagtagacgaaaatctaatcttattcaaaaacttaaaaacaatactatgcggaggagatgttttatctccacatcatattacgaaactgaaaagtacttatcctgaattagtagtcgtcaatggttatgggcctacggaaaacacaacattttcgataacccataccattgacttaccgataaaaacatccgtttcgataggtgttccgataagtaatagtactgtttacattatggataaaaaccatcagctggtacctaaaggagtcattggtgaaatctgtgtaggaggcgacggtctggcaagaggttatctgaacaatgccgaactgacccattcaaagtttataacaaacccttataaaacagaggaaagactctacaaaacgggtgatttaggcaggtggacccataacgatacaattgagtttgtaggcagaaaagacaatcaggtaaaattgcgaggttaccgaatcgaactgggagaaattgaaaatatcttatgtacccacaaattaatattttcatccttggtggttataacagaaggtacagcagcggaaaaaaaattaattgcctatttggttaccgatgaagatcttgaaagtaacactttgaaaaactggctcagaacccaattgccaaaatacatgatccccaatcattttgtctttttgcgagagtttccgttaaacatcaacggaaaagtggacagagctaaacttcctgaaattaccgatctggaaacagaacgtgcagcctatacggaacccgtgacacctactgaaaaaacactggctaaaatatgggaagctgttttagaaatagaaaaaataggactcgcagataacttctttgatctgggcggacacagtttaaaagctgtaaaaatgttccaccttatcaacaatcagttagaagtgaaacttaccctatctgatttgttcaacaatccaaccatagagagtctggcgaacgaaattgacaatgtcatttgggccaataacgaagaactggaagatgtcgaaagcgaaaatatcaccatctaatgcaataaacaacaacaataaaacctaaagcccccttaaaatcgaaccgtatttaatctatgaaaataaaagaaatatatgcactgaatcctttacaggaaggaattttttttcgctggcaaatatcagaaaatgaatattttgaacaatcctgttaccacatctatgggaaagttgaggtggagttgttacagaaaacatttgattttttggtgtcaagacacgataccctaagaacctgttttaacaacactaccgtaaatgatattttgcaagtggtactggacagtgttccttccggtttttattaccgggacgagagcgccaatgaaaatttttctttggagaattttaaaaaatcagacagagacaaaggatttaatctttacaaaggctcacaaataagattaactgttattaagctacgggaaaatgtatttgagtttatctggagttaccatcacattattttagatggctggagtattgaactcttaataaaagattttttttacgcctataaatgtttattggcaggtcaggagattaagctacctgcaccgccaagttattcagcctacagcaagtggctgatggaacttgataaaaaaagtatagcggcttattgggaggaatatctttccggatttgaaactaataccggaataccattttttaacccggaaaatcaaaatcgtcaggatacggaagttaaagtacttcatacgctatccggaaaaaataaagggactgttacagcactctgtcgggaattaggaattaccgaaaatatcttttttcaaaccatttggggaatactgcttgccaaatacaatgataccgatgatgtcgtttttgggagtgtagtgtcaggcagaccttcagaagtagatcgaatagaggaaatgttggggctctttattaatacgattcccgtaaggataaaattcaatgcagaagaaacgataaagaatatcctgatcgatacccaaaaagaagccataagaagtatcccaaatcattatattcaactggcagaaatacaatccaatagtaatctgggacagcagttgtttgatactttggtggtttatgaaaattatccttcacaggagtatgcagaagatgagttgattaattcggctcaggacactttagaagtagtagcggtagaagcatttgaaaaaacaaattataatttttcactggccatagttccggggattgataccgtgttaaggtttacctataatgctcaaaaatacagttcggaatttatagaaaacttaaaaaaatcttttgagtacctctaccttcaggttctcaataatcccgacagtttattttctgaaattgatttagtggcaggagaagaaagaaacaaattattttttgatttcaacagagagacttttgatattacagtaaaccatacgatcatcggatatttttctaaacaagtcttaaaaaatccaaataaaacggctgtaaagtataaggaagaatctcttagctatcaggaattagatgaaaaaagtaataaactggcacattatctcattcagaattatgatataaaagagcacgattttgttgcagtcgcattagaaagatcagaaatgttaatcgtaactattttggccatttttaaattgggtgccgtttatgttccaattgacattcattttccggaagaaagaaaaaaaatcatagtagaaagcagtcaatgtgtagtagtagtcaatgaagatacgatcaaagaatttgaaaactctactcagaatgagactgctataaacagagaaatagaactttctcagattgcttatgcgatctatacctcagggtctacgggaaagcccaagggagttatggtgacacatcgcaatttcagtgtacttttggccaattgcagaaaaaaattcggaacagatggtaagacccatttcccggttttagcgtcaaattcttttgatatttttttcttcgaagctttttatcctttaacgataggggggaccatcacgatattaaattctgagaccatacaagatcttgcgcttttgagcaaagaaattgaaaagatcaatggcttccacgctgtaccggttttaatgagacagttattggattatagtattgattttggtattgcagatcgtttctcgcaggttacaaacgtatttatggggggagaagtttcttcaaacgaaactttggaagatttgtcaaagacattccctaatgcttctattcatgtattgtacggacctactgagggaaccatttttataacgggacaaacttatttacagaaacagaaaagttacaatccgcaactcataggaatacctaacaaaggttcaaaaatatacctgctggataccgcaaataacctggtgcccataggagttccgggagaaatttgtattgccggcgagcaagttgcaaacggatatgtaaatgatgaaggccttgaaagagacgtttttatgactgattttttttccaggaagaaactctataaaacaggcgatttagcccgctggcattttaatggagttattgaattcattggccgaaaagacagtcagattaaattaaacgggtatcgtatcgaacttggtgaaattgaagcggtacttcgggaacaggaaaccattaaaaaggccatagttttagtggacaaccaaaaggatgatcagaaaagaatcgttgctttttatacgggagctgcagaactggacgagaaatcattaaaaaaacagctgcagcaaaaattgccgtcgtatatgattccttcaaagataatttgggtggagacctttccagtgttgatcaatggaaaaacaaatgtgaaagccttattgactttaggacagcaaaccagcaaaagcgaacaatatattttgcctaaaaccgagttggaagcaaaaatactaaacatctggaaagcgatcctgtgtaatgaaaatattggcatacaggataacttttttgaaataggaggtaattccatttcccttatgaaaatggtacggctcatcaacaaagaattggatataaacttaaaagtactcaatgcatttaagtgtggcaatatcgaggcacttacccatcatattacacaagatatagagcctggtcttgagaaagtgaacgaaaaaaattctaaatcggttgacgtcgccaatcagaccctgtcaattttaaaaaagaagcagcaaataaattaagaagtatctcaataaagtaaaatcaaatggcaacaaacgataatacaggtttagaaattgcgattataggaatgtcctgtcaggtgccgggagcaaatgactggagaacgttttggaacaacatttcaaaaggagaagagtctgtttataccttatcagaagaagaacttcttaaaagaggctttgttacaaatgagaccaacaaaaaggtgcacattccggtcatagcagaattagggaataaaggaagttttgatgctgccttttttggatttacaccttatgaggcagcactaatgagtccggtacaccgtatgtttttacaatcggcctggcaagctctggaagatgccggatgcctgtcagaatcagcaatcagtatttatgcgggcagcggaggtgatttgccctggaaagcacatgttgccctaaatagcgacggcagtacattagatcctcttacgcttgattttataacaaacaaagatcatttgcccactttaacgtcgtataaattaaatctgacaggtccttcattttcaatcaatacggcttgttcgacttcactttcagccgttcatctggcttgccgtggactcttatttggagaagcgaaagtagctttagccggaggtatttctttaatgttggagcccagattcggttacgaatacaaagaaggatctatttattccaaagacggacattgcagagcatttgataaaaaagcaacgggaaccatcggcagtgaaggcgttggaattgtaatacttaaacgactggaagaagcgctggaagacaaagatcatatttatgccgtaattaaaggaagtgccgccaataacgacgggaacagaaaagtaggttatacagccccaagtattgaaggagaaatggaatgtataagattagcgcataaaatggccggaatagcacctgatagtgtgagttatgtagaagcacacggaacaggtacaaccttaggagacccgattgaagtagaagcacttaacatggcttttgaaaataatagagaacacaattgtttactgggttcagtgaaaaacaatattggtcataccgatacggcagcaggagttgtaggcttaataaaaacagcacttagtttaaaataccgtcagataccgggaacgataaattacagcgacccaaaccccaaaatcaattttaacgaaggccctttttatgtccaaaaagagcttcagaaatgggaatcggtcaataatgagcctcgtagagccggagtaagttcttttggaataggaggaacaaacgtgcatctggttttagaagaagcgccggaaaaagataaaaatgaaacaaaagaaacatccagtcttttccttttttcggccaaatcaaagagttcacttcaaaattaccttttaaaatttaaggagttcctaaaaaatgaaagcgacattgctttggacgaagttgcttatacccttcaaaccggaaaaagacattttgattacagagccgcaataagctgtacgaacaaagaagagttattcttgtatgccgatattttaagcaatgaagaaaatatagggaaggttgatgaaaagaaaaagacgatactcttattttttcctcatacaaaccatacggatatccaattttacagtaatctctataaagaaaatgcaggctttaggaataaaatagaccaaagtattgcaacagtggagctgggcaattatgacctgaaaaaatggatgaatgaaacagcggttagtggtaaatcaagagataaattactcgccaaagtgtttacggtactatccggttatactttagccaatttgctgaaagaatatggaatacggatcaattttacttcaggtgttggaataggagaatataccgcagcctgtgtttccggaatattacagttaaacgaagtactcgggatgatgctgtatgatgaaaaggaagtaagcatacaacccgctaagattccttttgtacaaacagccaaagacatcactataaaagaaggaattttaactcctcaaaaatattgggtgaatggcagaagtctgaaaattaacgcgtcgaaatccttcagtgatattgtgcaaaacaattcagctgttcttttggaaatgggtgacagcacaggtctgacacagtttttaaataccactttagctgaaaattttgaggaaaatagccatgtcactatttccttatcgcaaacggataaagccattcatgcagatgacatcctaaaaaatactttaagaaatttatggctcgcaggagaaaatatcgattggaaagaaacccatgctgacaatcaccctgcaaaaatcacgctgccggtttatgaattcgataaaaacgaatatccgcatgtggtccgtcttacccccgaaaattttaattttttggctaaaaaagaggaaaaaaccgaagttagagagaaggtgaatgtttcgcagaaaaaaaaggaaaccacttcagaaactattcagtctgtgtttgttgaatttcttggagaggaaaaatttgatttggataaagaccttttcgaaataggctgtgattccctgaaaggaatgttaatcctcaataaaattaaaaatgaattgcaggtcgagttgtctctgatggattttatggagcatagttccgtaagagaagtaatcgaaaccgttgagacaattaccaacaaacaggaccaacaagtaaaaacaattaccatttagccccattattctgaatcatagaatcgtaaaatattcttaggacaatttactctacttacttaaatcgaattgattatggatacactacagtttttgaattatttaacggaagaaaatattactatccggttatctgaagataatcttcaaatttcttatacaagtgaagagatttctgaggctgtgatggaggaaataaaagtacgaaaatctgaaatcgtagaatttttaaaacagcagcaggaaaccagaatggaagcaagcataccattggcacccgcagatctgatgtattatccgctcacaccttctcagacaagatcatggattgtgagccacaattggggcgataattatgcttacaacatgtcaaaaagctttcagtttgaaggagaattagacattgcagcgcttgaaaaagccagtcaggaattgatttccagacacgagagccttcgaactgtttttgctgaaaatgaaagtggtgaaatatgccagtggatcaaaagccctgaagcgctaaattttaagatcagtcacattgattttagaggagaggatacttcagaagaaagattaagcaagttcattaaagaggagaggggaataccttttgacctgcagaccggtcctttattgaaattttacttaattcgtttagaggcagataaatggttgttttatagtatcattcatcatatcatttgcgacagcagatcattcaatattctgatacgcgatttattctttttctataaagccgaagtaatgcaaatggatgctttattaccggagctcagaatacaatataaagatgtggcggtatggaaaagcaaacgttttgaggatataaatttaagtaaagaaaaagaatattggatcaatcagctgggaggagaactgcctttgctgcaattacctgaagattataccagaccggtgattagaaattctgaagtggggatgctaagacgcaccattaaagccgaatcagtaaaagagtttaagacgtattgcagaaacgaaggcggaaccttgtttacaggattgatgactttatttaatttagtgttctataagtttagtgaacagaaagatattattttaggatttccggtgtatggaagagatttttctgaattggaagatcaaataggtttttacgcggatacaattgctttgcgaacccgttttgaagcgcagaatacctttaaggaactttttaatattgtaaacaccaatgctttcaatgcctatgaaaacagagagtatccatttgaagaaatcgtaaatcagcttcaggtagaaagaaatccgggcagaaataccctatttgatgtatttgtcgtattgcaaaattttgacgctgattctctggaagacgatttccttccgggaggattaaaagtggttgaatttgcagaactgaaagaagggtattcagcttatgatcttacgtttaattttgcggaatccaaagagggaagccttttttacgaaatcgaatacaactcagcaatctatcaggaggaaacaataaaacgtctgaccgatcatttagagtatttaatgacggaaaccatcgcaaacgataaaattgctataagtgctctggagagcatcgattctggtgaacgtaaaagaatttcagaatggagccgaaatcaatctaatgttattctttctgataaattaacaggagatagccgtacagcgttggattttggtctttattatttcggaaataccggaacagaagaaaatcagtatgaaatactaatgattggagcagcttatgcagatcttaatggttatagtgcagtctggacaccggaacgacattttaatgaatttggcggaccttttccaaatccaagtgtcttgggagcagccgtagcagcaagaaccaaaaatataggcataaggtcaggaagccttgttgcaggacttcatcatcccatcagaatagccgaagaatggtcggtagttgataatatttcaggaggaagagcaggcatctgctttgcttcaggatggaatgctaatgattttgttttttatcctgagaattttaacgaccgaaaggatattttaattcagaccatagaagatgttcgctcgctttggatcggaaattcggtaaattttaaaggaattgattcgatagagaaaccttttaaaatattaccaaagccagttcagaaagaagtttctgtttggattgcctgtaccggaaatatagaaacctataaaagagcaggagaaataggagcaggaattttgacaggattgttaaatcttagttttgatgaactggaagaaaaaattgcggtatacagaaaggcttacaaagaaaataatcataaagaaggcggcgacagagtggtactcatgttacacacttatctggatgaaacggtagaaaaagcacaggaaaaagcaagaccatcaatgaagaaatacttgctaaagtctcttgaaatgaatgggaaagaagctttggaaaagagcagtgatccgtcacttcaaaaaataacagaaaagtcagttgacgaaatgctggatttttcggtgagcaaatattttaaagaaggcagccttatcggaaatttagaaagcagtttaccgatcttaaataaagtggtaaaagcaggagtaaatgaaattgcctgtttaatcgattttggtattgacaaaacaagtgtgttggaaggcttaccttatatcacaaaattaaaagattcttttaacgctgtacaaaaagagattggtgcaactaaaaaggaggacagtagtaagagtattgaaacttcggtactaaaactttttaaagaacaatatcttttgcatccccataagattgcagtttcggacggtactgattcgctaacctatgaagcgctttaccagaaatcagaaaatctggcccgatacttacaatcaaaaggagctaaaaaaggaatgatcatcccgttgtgcatcaaccgttctgttgatcaattagtggggattttgggcatcctgtttaccggagctgcttttttacccattgattccggtttcccaaacataagaattacgcagattatagacgaagtaaatcctgaattactggtagttcaaaaagaaaacacgagtcttttttcttccgaaatagtaaaagtagacatccatgaagttcccaatgttagggacagtattttcgaagcggtagcaatagattcaagtgatttagcttacgttatttttacgtcagggtcaacaggaaaaccaaaaggagtaatgatcagtcatcattcacttgagaatgtaatcgtttcattgtctcagcaattagaattggatcaaaccataaaatttgtagcagttactcctctgatatttgatatttcacttttagaaatcttcttgcctttaatcaccggagggcaggttgtaatgacaaacgaaaaggaaggaaaagacatttatcatctcaataattttctaaaagagaatacagtaactcacatgcttacgacgccaacaagatggaaaatgcttttggacacaggctggaaaaatacagaaaatctggtggttatggctgccggagaagatttggatcaacaactgaaaaataatttggtcgcacttaccggtaccggtatctggaatctttatggaccaactgaaaccgccatcatctccagtttgcaatttttggaacaagacgatatcgtaaacatcggaaaaccaattgataaaacaggattatatgttttgtctgaagaaaaaatgctaatgcctcagggcgctgtcggagagctttacattgcaggaagcggacttgctttaggctattttaaggataaagcactttcagacgaggcgtttgtttccaatactgttgatcctgagatgggcgatttgttatacaaaacgggtgatttagtcaaatggctgccggacgggactttgaaatatatgggacgaaaaaagaatcagataaaaatcagaggttatcgtattgatttaaaagaaatcgaaaatgtcctggaacaataccaatccgtaaaaaaagcaatattgtccctgaatgaagatgaaaatggtgaaaaagaattgacagcctatctgcatagcaatgaaaaaatagattatgtgtcattaagaacatttctgaaaagctatttaccggattatatgattcccgaaaaatttaagaccgtaaaggaaatcccggtaaccgtaaacggaaaagcagatctcaaaaaattacaccttcttaaaaataattataccataagcaatcaaaacacttttgtattggcgagaaatgagacggaaaagcagttaacggagatttggaaggatttattaaaactggaagaaataagcgtaaacgataacttcttttttctgggaggaagcagtttgaaacttgcaaaaatgaaaaatgaaatctataaacgattcggtataccgcccgtttctttaaccctattgcatcaacttactatagcctctttctcggttgaggtagaaaaattagtcaaacagacggaggaagttgacgaagaggaatacgagaaattcaatatttaagatactcttttacttttctaaaattaaaaccaaataaccttttaaaaattcagaaatgatggaaaaaataatttcgcaaccgtcaatcgatgttgtaaacccattattattttctatgggcgaagatgtgatgggatttctaaacgaagttcagttgcaatatcctgaggcaatttcatttgcatcaggcagaccagatgctaaatatttcaatatcgggcaattttctgaatgtctggactattttgtacagcataatgttcgtgaaaaagggattgaagaaaatatagttttggaaaatctgggacagtacaacagaaccaaaggaatcataaatacagaagttgcaaaatatctgtttattgatgagtttataaaagtaaatccggaagatatccttatcacagtaggagcacaagaagccatcgccattggaataacaacgctttgcgatcgggaaaatgatgttattctggtagaagatcccgcttacattgggataacacattttgcaaaaatcaatgactacaaaattgaaagtattccggttattgcaaatgaatcttccataaaagcaattgaagataaaattttggagcatcaggaaaagggtaaaaaagtaaaagtggtttacgtaattcccgattttcaaaatcctaccggaaacagcatgtctttgtccaaccggcataaacttctggcattggcacgtttgtatgattttgtgatatttgaagacaatgcctacggtgatttttattatgaaaacgaaaaattgcctactctaaaatcgttggatgaaaatgatactgtaatctacttgagatccctttcaaaaacgatatacccttctttacgtctttgtttaatggtcgttacacaaaaagtaaaagtacagggtaaaatttttgccctaagcgatttaatggcgaaaacgaaaggatacgtcactgtaaataccccatcaataatgcaggccatgtttggcggtttattactaaagaacaaattttcgctcgaatccttaaatgctgagaaacggacaggtatgaaagaaaagagagatcagcttttagaaagtctgaatcatttctttaataaggaaacacagtactgggcagaaaatatcagttggaatttacctgcaggaggttttttcttaattcttaaagtgccatttaaagtgccaaaagaagatgttataagatgcgcagaagtcaataaagtaatttttacccctatgtcttttttttacatgaatgaaggaggcgaaaaggagttgaggctggcctttagtaatgtcaccaaagaagaaatcataaacggagtgcaaagattgtctgagtttataaaatcgaaagtaaaaaaccaataaaaactataaaaatggaaaacaacaatgaaataatcgtatctgatttttttaatatggagtacgattttgtcgagtattatgtgggtatggctaaaatggtagtattctggcacgttaaagcattaggttttgaagtgatagcttacgccggaccggaaacaggtgttttagatcgttgttcttattatatcgtaaaaaatgatataaaactggtgatcacctcagcatcacagcctagttcgtataaaatagtttctttcgtagatcttcacgggaacggtatcaagagactggccataaacgttgataatgttaaagatttcttcgaaagagccatgaaaaatggggcaataccagtagaacatccgcatttaacctcagatgaaaatggttttgtagaacaggcatctttaaaaatgtttgatgataatgaaattgtactcatcaattacgataattataatggagactttcttccgggatataaaaatgtacagagcgaatggaactttgaaggagaagataccggtctgcaaaaaattgatcacgtcgcttgtgccttaagactcaacgaaatcaatttatgggaaaagtattttaacaacatcttcctttctaaaaccgtggtcgaatttgacgagagaaaagtaaaaggcgaaaagaaaatcgggatgttattgaaagtgcttcaatccggtaataaaagtattaataacgttttggttgaaccggaacatggcgcaaaaaatcaggtacaattgtttatcgatcaaaactacggaaccggaatacagcatatcgcttttgaatcaaacaacattattaaatcagtaaaagcattgagagagtccggtgtgaaatttaccagatatccggattcttactatgaaaaattagcttcgaaatatcctgaattggacgtagaacctttaaaaaagcacgggatcttgtgcgatgttttagagggagccctgctctttcaaatctttaccacacctataggagacagagctacatttttctatgaaatagtacaaagagtaaatgattatcagggctttggtttagataatatctacgctctgtttgaagcaatggaagaagaactgacactttcgaataaaatttaacaagaatgacaggctgcaagaccgatattataaatgctataattgaaatagtggggcatgactatgtattaatgaatgctgagttattgtacaattattccagagactgcacctctgatgaagagagtataccctcggcagtaatcttacctaaagatgaaaaagagatttcaaaaattcttaaaatctgtaatgaaaccaagaccagtatcaccgtgagaggcggtggtaccggagtcagcagaggagcattatctcatacaaacggcctgatactttcgctggaacggttgaataaaatcatcgagattaataaaatcgacaggattgttacagcagagtcaggagtgatcactcaggatttgcgtaatgcggttttaaaagaaggtctaaattttccgcaaaacatcagcagtgccaacgcttgtttcataggtggaaatatagcagtatcgagtggcagtccaaaatcattgaaatatggtacgactaaagattatgtcatcaatttagagattgttttacctgatggaagtattatatggacaggaaaaaatgtaactaaaaatgcgaccggttataatcttacccaattgtttaccggaagcgaaggaactctgggcatcatcactaaagtagtattaaaacttgtgcctcccgtaaaagaactgcttctcatgattccctttactaaaatagagaagctgtttgaaggcgtacagcagttttttgtaaaaggatatgacgcttcaagtattgaatttattgatcagaaaggagtagagctggcctcaaaatttctggataaaaaacaatgggattctaaacgtattgaagggattttatggatcgaacttgaaggaacagattcagaaaaactaatgcagcaggctattgaaatcagcgaatttatcagcgcttacacaccagaagaaattagcatagccgatacccaaaacgaagtgaaagcattatgggaaatgcgttctaaaattggagaagcggttattcatcatgtgtttttcagagacatcgacattgtagtaccccgttctaaaattgatgaaatgtacaaatcaattgcagggatagcccaaaaatatgattttgaatacacggttttcggacatgttgggaatggaaattttcatgtcaatatttttcaggacaaacaaagcagcaaaaagcaatgggaagaccatctggcaatttgggtgaaagccattttcctaaaagcactagaactaggcggaaccatttcaggagaacacggagttggtaaaattaatcttccctatttagaagatgccatgaccaaccatcagatccatataatgaacggcatcagggagctatttgataaaaacagaataataaattaacccgttgggtgtagttaataaaaaaacattccacacatagtcccgatgcatcaggatatgtgtctgaaagaatacaaaagaaatctgtttctaacgcatagtagtcgctgtatgtcttaaataagtgaaacgccttttttggagagtattaaatctatgtttctatgtgctgaaaaataatagccacagattaaaggattaaaaaatctgctaaatctgcgtgaaaaaaaataacacatagatacataggttattatgtgcagaaaagaatgtctaaaagaaatacatttctttcacataagctctgtgttttattaaaagtgaaacgccttaatttgatcataaaatatcttataaagtatctcatcttttttctatcaggagcattgttttatatgttgtataataataaaacatttaaactatacctatttttactaatagtaagttttttaatcattaatcatgcttttgatttgtctgaatttatttcagcaataatcatgtttttattatttttttgctttatatactatcctgggtccttacaatttttagaaaacagattcattattaaaattggagtgtcatcttactttctttatcttattcacgactatattggagtagtgtggattaagaacatagttagctttttctatccaaacagttttatcgcgccaatcttaattatgattgtaatgattactttaagtattttttacacgcaaaaagtagaaactaagattagtagatatttacataaatgtttattaaataagaataatgactaaggtagctgtaatttgtaattataaattacttccggaaagagtaggaggtatggattattttttctgggattttgataagaaatgtaaagaaaataacattgatatcgattggttttttcctaatagttccaatcatgggaattatcccaatctaactatttacagcagtcaagaactagctcctgaaaataattttctttctttttgcaaagaacgtaaaccagagtacacgcatatcattactcatttcgtagaattatgcacctcttttttttataaggtaaagaaagtttcaaatgctgaggtcattgctgtagatcataatccaagacctttaaacggatattcattaaaaaagaaaataaataaaagactcaaaggaattctattctcaggatatattgatgtttttgttggggtatccaactatactgtaaaagaaattttaaatgactttggaactcatataaaagcaaaaacgatcacgatttataacggagtaattatagattcaattttaacaagagccaacagagctaacactcaacccgtttttttagttgcttctcaccttagagaatctaaaggaattcaggatttaattgaagcagtatatcttctgtctgctgaaataaaaaaggagattaaaataggggtatatggcgaaggaccttatgaacagcatttattagaaaaagttaaagaatataaagtacaggattgtttcatttttatgggtagtaaacctaatttaaatgaaattttttcgcagtacgattatatgttgcagccgacccatatggaatgttttagcctgtcaattctggaaagtcttgcggcaaacgttcctgtaattacgactaatgtaggtggaaataccgaagcaataacctcaggagaaaatggatatatttttgagaccaaaaatgtaaaagcactggcaggaattcttgaagatgtttattcagggcgcaaaaagatatccattaatacaagagaattaattgctaattccttttctttgccgaaaatggtcgaaaatcattttgcactactcaaacaaaatggattaaaattttaaattactgtaaacaaaaatatgttttttaattccttagcattcgctatttttttgccaatcgttttctttctatactggtttgtatgtaataaaacaaaaaaagctcaaaatgctttattaattatcgcaagctactatttctattcctgttgggattggagatttttatttttactcattttctcaacttttttagattattataccgggattcaaatcgagaaagggaaatcagagcaaagtcgaaagttttggttttggctcagtatttcagttaatttagggtttttaggaatttttaaatactataacttttttgccgcatctttttcagaattattaaattcggggggattcaaagcaagtccgatattgttaaatgttattctccctgttggaatttcattctatacttttcacggactatcttatgttattgatatctattacaaacgtataaaggccgaatacaactttgttgattattcattgtttgtgagttattttccattacttgttgccggaccaatagagagagcaacgcatttactgcctcaggtaaaagttaagagagagtttaattttcaaatcgccaaagaaggtgtgtatcaaatcatttggggattgatcaaaaaagtagttattgcagatacatgtgctacttatgccaatgctgtttttgacaattattcttccatgaattcattgtcgcttatcttaggggccatatattttgcatttcaaatttatggtgatttttcaggatactctgatattgcattgggagtttcaaaattgtttggattagatttacttagaaatttcaattatccctatttttcaagggatattgcagaattttggcgtcgctggcacatttctctttcctcatggtttcgagattacctgtatattccgttgggaggaagtaaaggaggtatttggatgaaaatcagaaatacgtttatcatttttatagtaagcggattttggcatggagcgaactggacttacatcacctggggatttgtaaatgccatatactttctaccattgctgttatccaacagtaaccgcaataatatagacgagattaaacttagttttaatactgattctgtaaaagtgatattcaatattctttttacattttttatcacttgtatagcctgggtgttttttagagcaaaaacaattacggatgctgtatcctacttaaagcgaatgatttttaatggggatttttattctcaatatcttgataacgagcgttacaattatgaggtattgcctatgatcgtattatttgttttggtcgaatggaataacagaaccaaagaagagcctctttcaggaaaaagaagtatgttgagggtgattttggccctaggtgctatactggcatttggaacttattcagattacaaagaatttatatattttcaattttaatgaaacgattttgaatttatacagccaaaatcttaatagcggtaattttgattgccgtaatactggatggtttgtataccgctattttttttcaatctaagaacagagggaaggtagagtctgtttttaattctgaagcctgtaaatatgatgttgtaattttaggttcttcgagagccaacaatcattttgtttctcagatgtttgaagagaaaggattgaaaacatttaactatggtatgagcggaggacatttgtttgaagcttcattgatgttaaaattaatgatcgaacgaaaatatgaaatcaaaaacgtaattcttgaagccgatttgaatctttctaatgatcaggaatcagatggagtttctgcaaagtttttaccttatatgcataactcaaagcttataaaagatcatttctccggtcagaaaaattttaacgaactgtattacatccctttttacagatacataaaatttgattcaaaaattggctttagagaaatttacaatatagcaggaggcaaagcaacaaatgcattagataacttaggatattatccattggtaaaacacaaaaatgggaatatgaaaaataatattgttaatctaaatcctttgcctaaaaataaatactacgaagaaatcaaaaatatttgtaaagccaataatataaattttattgcggtaatgacaccaatgtgtgagaatgtggtaggtatgaattattttgataaagttaaaaaagcatatccggaaattcataattatgagaatgttgtggtagaaaataaatatttttcttcctgcggacacatgacagatgcaggagcaagaatatttaccacgcgaatcttaaaagactttttcaatcgataaattatgaaaatagcttttttaacaccagaatatcctcacgctgctactggaaactcaggcggtttgggaacaagtattaaaagcttagcgattggacttttagaaaaaggagtttcggttcgtattttggtatatggtcagcataaagatgatatttttatggataacgggatcattatccaacaaataaaaaataagaaattaaaaggattatcgtggtttctgaccagaaaaaaaatagagaacataatcaatcagttattttctgctaaagaaattgacttagtagaaacggcagactggacaggaattacttcttttattcagcctcaaaaatgtccggttgtaatacgactacacggatctgatacctatttttgtcatctggataatcgtcctgtaaaatggattaataagtttcatgaaaaaagagctctgaaaaaagcaacagccctgttatcggtaagccaatttacagcagatacaacaaatcaggtttttggtctgagtaaaaaatttatagtgattcccaatcttgttgatctaaatttgttccagccttcaaacaattcggtccctgatgataaaagcatattttattttgggagtctgattagaaaaaaaggacttttagaattgcctttaatttttaatgaggtggtagagaacgatcccgcagcaaaactcattttagtagggaaagatgttccggatattatttccggtaatttgtcgacctggcaaatgatgcaggatcttttttcagaaagagccaaagcaaatgtttcttatttaggaagtgtttcttattccgaaattaagaagaagattgaacaggctacagtttgtatatttccttcgtttgcagaagcttttccggtttcctggcttgaagctatggcgatgcaaaaagcaattgtggcgtctgatattggttgggcaggagaagtgattattgatggagaaagtggttttttagttgacccaaagaaccatagtttgtttgcaaccaaaattcttcactttcttgataattcaatgttgacaaaagtgacaggagaaaaagcaagaagcagagtggaacaattttttagcaccgataaaataacaaatgacaatattaatttttataaaaaaataataaatccggaatagagaaatggaattgaatgagtttagaacaagtagtggagagattattctttacaatgggcaacctgacttagagaaactggaagttttgtgttctggcgccggagatatttggcatagttcatttgaacaaggttataaaaatgctttcccggaattggtttatcaaacggctacttttttttggtatatcaatgattttgataatctggacgagtgcgtgagctggcggattaattcaaatgcatttgccattcgaaaatctgtctgggaaactttaggcgggtttgatcctgaatatcaaaatcatcaaattcaggcattagattttgggtataacgcattacggaattctgctgcaattccactttatataaaaggtttatttacggataatatcaaagagagaattaatataacagcaaaagacagatacattttttttagaaaaaactttaaaaaagaacattcattattcatgctttatcgggaaggtttctggaagacgaaagaatggaatgcttttttttatgctgcgaaaaattttaagagaagctctgaaaaaccagttattaaaccccgtgagttaaattgtatcgaaggtaaaccatctgttagttatatcattccaacaatgatgcgccaggattttaccttgcaattgttagaagatttgagcgtgcagagttatcccgttgcacaagtagtggtactcgatgcaactcccgaagcgcttagaaatgaaaaattgtattctgaaaaagattttccttttgagttaattgttaaatggcagcaaacaaaaggaagctgcagagcccgtaatgaagctatagagttgtgtacgggtgaatatatcgtttttggagatgacgatgttcgtgtacagtcaaatttcattgaaaatcatatcaggttaatgcaaacctataaagtgagtgtctgtaatggcttagatgtcagagcagataatgaacaacaggaattaaaagatttagaagttaaacttgaaaaattaggagagaaaagatggaaatctggtgcatcctcaacttttagtaatgccaattcttgtgtgaaaactgaatatgtcagaaagctaacaggcaacgatattaactttgatggaggttatggtgaagatactgattttggaatatcgttagctaaattaggacaagtggttattttaaaccctttttctccaaatttgcatttaaagccacctgctggcgggtaccgtttttgggggagtcaggctaaaatcacagggaaaaagagaaaaacacagccatgggaattagatactccggtaaagacaattcgtcccgtaccaagtccgacaattatgtacggtattgtaaagcattttactcctcagcaagtaatcgagtacaagtacaaatatttttttctatacctctttaaaggttccaaaaaaggtcttttgtatcgattttttagaattccgtacaaaaatcttcagtttaaaaaatcactattttatgctaagaaattaaacgatttgggagtcagatataaataaaacatgaaattttccttaatcatttgtacttatatgcgtcctcagcctttgctggagttattgcaatccgtaaagacacaaactttatatccggatgaaattttaattattgacggttcattaaataaggaatcagaaattattttaagtcagaattcattccaaaatttaaagtactttttagtcgatgatcaaaatcgcggactcaccagacaaaggaattttggtattggtaaagttggtcaggatatggaagttgtttgttttttggatgatgacacaattctggaatcagattattttgaaaaaatattacaaacctatagtgcgttttcggatgctatgggcgtaggaggttatattacgaatgaagtaaaatgggaaaaagcaacagaaaattacattcctcagattaatgaattttattttgacgggtggaaacgcaaagatgggagtagatttgttttgcgaaaaaaacttcatttagacagcaattgtcttcccggtttttctcctttattttcacacggcagaagtattggtttcttaccacccagtggtaaaacatatgaagctgagcaattaatgggaggtgtttcttcctttaaaaaaatagtttttgagaagctgtcattttcgacctattttgaaggatatggtttatatgaagatgctgattttactttaagagttgcaaaaattggcaaactttatgtaaatacagctgcaagattaggtcattttcatgccgaaacaggaagacccaaccggtattattacggaaaaatggtcgttagaaacggatggtatgtctggcgtgttaaaaaccccaatccgaattttaaggatagatgcaagtggaatgcaattacattacttttgatcttaattagatttagtaatacatttacctcaaataataaaaaggccgcttttacagaaagtcttggcagaattttaggctggtttagtttaatttttaataaacctggagaataaaatagttagatgaatctatttcaacttataaagtcagattataggaagtaccgcaagtatggcggtcatttctttgtaattgtattttttactcagggcttttgggctacttttcagtataggatcgcccattatatttatactaacattgcctggaaattatttagacttcctctgttgttctctactttaatgtggcaaaaaactattgaaattctcacagggatttctatagcatcttctgtaaaaattggacattccttttacgtaggtcattttgggggtattattatcaatgcaaaggctattattggggataattgtaatatctcacaaggggttactattggagtatcaggtcatggtgaaaagagaggaacaccaattttagggaataatgtatacattggagctaatgcagtagttgccggtaaaattactattggtaataatgtactcattggtgcctgctcgatggttaaagattctttaccagagaatgctgttgcaatgggggttccggcggtaatcatttctcaaaacggttcaaaaggatatatttaatgaaattattaattgtctcatcggcgccattaatttataaaaaccaaattccatttgcttatagtccttatgtgaaggagctaatcgttttagaacagtttagcgatgattttattttctgctgtccggtttgggaaaaagacagagggcttttaattactgaaatcccttttacttttaaaaagcattttcagcttaaagattttaatttaagttctttttcaaatattctgaaatccttttttttcagtttttataatattttggttctatttaaagcaatgaaaaatgcagaccatattcatttgcgctgtcccggaaatataggtttgttggcatgttttgttcaggtgttttttccaaataaacctaaaacagctaaatatgcgggtaattgggatcctaaaagtaaacaaccttacagttataaaattcaaaaatgggttttaaacaatacttttttgactcgaaatatgaaagttttggtatatggagaatggaaaaatcagtcgcaaaatattaagcctttttttacggcgacctatgctgacgcagaaaaagaaagtgttaaaaaaagaagctttgaaaataggatagaatttatttttgtaggaagtcttgttatagggaaaaatcctttatatgccatacaattagttcatgaattattagaaagaggatataatgtagtgttaagtttatatggtgaaggggctgaaagaaattctttagaaaagtatatcgaaatcaataatttagaaaacgagattgttttacatggaaatcaggatctggaaacagtaaaaaaagcctatcaaaaaagtcactttgtcatcttgccatcaaagagcgaaggctggccaaaagcaattgctgaaggaatgttttggggatgtgtgcctattgcaacaaaaatatcctgtgttccctttatgctcgattatggtaacagaggccttttgttagaaatggatttcgagaaagatgttaatcaaataagcggaatactggaaaatcaaatgctcttttttaacaaaagtaatttagctggcaagtggtcacaaaattatacgaccgatgtttttgaagccgaaattaaaaaactcttgtcaaaatgagaatcgtacaaataatagactccctggaagctggcggagcagaacgtatggctattaattatgccaattcgttatcaaaaaacatatcgttttctggtttagttgtttcccgtaaagaaggattgttggtcaatcaaatagatcaaaaagtttcttatttgttcctgaagaaaaaaaaaacaatagatcttcaggctgtttttaggttacgaaagtatttaaagaagaataaagcagatctgattcatgctcacagttcctcgttttttattgccgttttagtgaaattgacgttgcccaaaatcaaaattatatggcacgaccattatggtatttcgcaagatctgtctgcccggaaaaatttaagcttaaaagcaggctcctttttctttacaggtattattgcagtaaattcagctttgaaagactgggctaaatcttatttatggtgttcaaacattgtttatttccctaactttataattgatgctgtttctactgaaaaacaaattttaagcggtgtagcaggcaagcgaatcatttgtgtagcgaatttacgcccgcaaaaaaatcacgatttattaattgatgctgccaatttgattagagacaaattcgctgattggacatttcatttattcggtaaagattttgatgacacctattcagaaaaactgaaaaaaaaggtcagtgatctaaaacttcaggaaacagttttcttttatggaacaagcggtaatgttagctcagcattacaacaatgcgaaatagctgttttgccatcactttcagaagggcttcctttggctgtcttagaatatggtttgcatagagtacccgttgtggcaaccaatgtaggtgaaatctcaaaaataattgcctctgaaaaagaaggattaatagtagaacctgataacttaaaagagtttaccgtagcaatcgaaaaattaatagtatctggtaaatacagagatgaaatggctttaggattgtacaataaagttcagttaaattatagtgaaagtgcgattgtaaaagaatatcttttatggttaaaatctttacctacttttgcatcttgaaacaatagacatataaatgaaaaataaaaaagaatattacattcttctgcttctaattcatgcagtaattgccgtggtcgtttttgccataccttttttatcgaaaatatatgcgcttttaattcctgttgtcggtctttttattgtttaccggactaaaaatgcaaacaatgaagtactgatagtagcggcatatttagttggcgttgaggtttttctgcggatgaccggagggaattttaacaatgaatatgttaaagtcaatgtcatttttttcatgctgttgggtatgatataccgtaatttctcgacaaatgcctttatatattggttttttttgattttgctgatcccgggtatcttaataacatctaccacttttaatccttctatagatgttaaaaaatcattggtgtttaatttatcaggccccttatgtttagcaatatcttcaatctatatgtttaaaagaagaattttgttcccggatttgcaaaaagtgttagttgcaatgggattacccatattgagcacaacagtatatttgtttttatttaaccctagcgttagagatgtagtcaccggaacacaatctaattttgaaacttccggaggatttggtcctaatcaggtttctaccgctttgggtttagggatgtttgtgttttttacacaattgatattgttttcaaaatcgaaaatgaaaattattttaaacggagttttgctaatatttgtgacctatagaggtattgttactttttcaagaggaggagttctaacagcagtggttatgattgtttgtttattattcttgctatataagtactcaaatctacgagggaaaaataaattcgtactggtttttattcttacgggattaataggtatgggagtttgggcgtactcttcttttcagaccaaaggacttatagaaaaacggtatgccaatcaggatgctagaggacgggataaaaaagaccgtttaggaggaagggagcaaattatgaatgaagagtttgccctttttagcgataaccccattttaggagttggagcaggtatggggagatatgctagggcagaaagatttagagatgacgctgcttcccacaacgaaatcacccgtatgttgagtgaacatggtttgtttggagtttttggactgataatactatttctgaccccttttgttgtctatataagtaacaagcagcatctctactttttatcattttttgccttttggctgttaacgattaatcatgctgccatgcgtaccgcagcaccggcttttgtatatgcactatcattactttttgtgcaggttaaaattcctgaaaaagcagaaaattccgtcgattaagttcttttttttataatatattcgcctcaagtttaagcccctaacaaacttattaaatgttttcaaaccataaaatgcatttcgaaatttcggaaagaaaagtattacttcttctttttgatgttgtttttattttatccgcattatacttgttaagtttagtatttcattataactattttgtttttgataaaagaaattttcccggtatacttttatttctgacttatgtatacacttttggtgtaatattcgaaatgtacaatttacaggtagccagtaatcagttgcaaattcttcaaagtgtaatttttacggccacagcttcaagcctggcgtatttgtttactccaattttatctccggaattacctaagcagcgattaattattgtaattttttattttacgatacttgttacattgttattgtggcgtttgttttatgtttattttttggcgtcacatcgtttttctcagaatgtagttttaatatgtgatcagaatcaggtggaagaattggttttaggacttgagaatgttgacccgcattataaaattattggttttgtaaattcagacgcaatttcagaagaagattcaaactttcattatgtaaaagaagtcaaaaagaaagatttagaagagtttgtagctcgtaatagggtttcggagattgtcattgcttctcaaaaaacagatggaatcacagccgatttataccagcaattgcttcatttattagaatcaggaaatatcatcagagagtatactcaggtttacgaaagtaaaacacagcgtattccggtgcactatatagcccgcgatttttatagattctttcccttcagcagaaataatagtaataaattatacttgttttctgttcgtttcatcgagttgttgttctccattacagggctgttggtttgttttctgtttatccctgttattcttgttacaaatttgttagcgaataaagggactttgttttacacgcaggaacgcgtaggtaaaaacggagttgtttttaaaatctataagtttcgaactatggtagaaaactcggagtctaatgggattgttttcgctacttcaaatgataaacggattacgcctttcggtaaaatgatgcgcaaatcaagaatcgatgaattgccacagttttttaatattttaaagggtgatatggccgtaatagggccaagacctgagcgaccattttttgtggcagaaatagcccgtataatgcctttttacgaaacaagacacgttgtgaaaccaggacttaccggttgggcgcaagtaaactattcttacggagaatctatagaggagagtttgatcaaactgcagtacgacttatactacatcaagcacagaagtatctttttagatttgagcattacttttaaaacgattactaccgttctgttttatcgcggacagtaaattagataataataggaatacgttttttatttcgaatagcgactctcaccaaaacaaatccactagttatgatcatgggcagaacaataaagaagtgtgctttgttgatcatgaaaatggtataaacgatcaaaaaaagtaaatgtagaactgcgaatcgatacgaccatcttttgttttttaagagcgaaaagaggattaataccaataaaagcggacttaataaaagtacattatagttcattgccagttcctgatgaagggaataaaaaccaaccgtaataaaaaagattcctattaacgataagataaaaagatatattttatctaccactttatggtgtgccaaaactacaaaagccagtagcaggaggtaagtgtaaatattattccaccatgagcttggaatctctttttcaaaacttagcagcgttttgcttttacttactaaaggctggttttgaaaagtagttttttctaaactgttttttaattcaaagggtaaaaagattttcgtacctgcctggtctactttagttccgaaaataatactggttcccagctgctcataaaaatgatctttgaagtaaggaaacagaatagatcggtaggtttcagccgtatctccttttttagttacaatatttgcatttaaagatttattgatgacatctaccaccatcgaagtacagtttttgtcgataaatttataggtataatatcgttcttcagagaatgcggctgcatttaaattgtcaaaaagtttttgttttaaatctggagagatcaaaagttcctgctcgaaaacacttcttttttcgttagtataatcgtttataaactcaggaaacgatcttacgctgacaaaatactgtaaatcgccctttgcgaatttagcgacaaaattgggtgttctaaaatcaaaattaccataattataaacaacatcaatagtgttcgccggatcggcgacgcgaatggcagtatgaccaaaataagagtagctttcattacccagtccgcaggtaataacacttatttgagcttcttttgataagggcacgttttggctgtaacccaaaaaacttaataataatagtaaactaaaaagtgtttttttgaaaaggacatttttcataatttaaaattttaagaagtttaagagttaacaaatattatctaaagatacctaaatctacttttaatgaaaaaatattagagtataaagcggtactttgatttcctaaatcagtcagggcataatcgacctgaatgcctttgtatttaaaaccaagaccaatgtttggttgaaaatttaacttttcggtattgtccaactgcgttacattttgaaaatttcctgctccggctcttaaaaatacaagatcagtataaccaaactcaaaccccaaagcaggatctatactaacgacttttgaggaaataatatcattggtttgctcgaaacgcatgtttaaattggtagcgaccaaaagactgtaatcgccgtgaaactcaatttttttagaaactcccagttgagcttttggtaacgtaatttcggtactttctggtaattcgttgttttctcccggaatggcattggcaattttcttgtattcctcttcatcaatattccaaacattataagtagtggtaatatcgcgaagcatcaaaccaaagttccatccatttctttcaaattgaagaccaaagtcaaagccaaagccccaggaattggcaaattttccaataacccttctgattacttttgcatttacaccatactgaaagccatctacaggtaattttctcgcgtaagaaaaagtaaaaccataatcggcagtagagaacagtctgattcggttgtaatctatatttccctgattgtcgatcaattgagtggtgtccatgatgtcatcaactccaaaacgaatcatcgaaattccccaggcacttctatcatcaatcggactggcatatccaatgtagtcgtattgtgcaatattggcaaagtaattggcgtgcatcaacgaaatttgatgatcctcaagatgagtaagaccagccggattccaataaacggaattgacatcatttgtagaagcgacaacagcacccgacattcctaaggcggctgcatcaacgccaatattcataaactcattcgaatattttcgaacggtttgtgcatactgtaaggtgcaactccacaataatacaaatacaaagattttcttcaacggatatattttagcaaaccggagtctgttttaatttttatcaaaaatataatattttactcatctaattgaaattattgtaaaacttaaatttttcatgagaaaatgcttatgaagcttttgaaaggcgagaattttaatagaaatttttgctattaatgtcgcttatttatacgaaatttgcccttcaccatttgttaaaaatataaatcatgaacattaaaaaacacattcctaatttaatcacattaatcaacttgttctgcggctgtattgctgttgtttttgtttctcaagataactttttaatggctttttgcatggtttccttagggatcttttttgatttttttgatggtttttttgcccgattgttcaaagtttcaagtccgcttggattgcagttagattcgttagcagatatggtaaccagtggtgttgttccgggttatgtaatgtacagtttgttcttaaaaagtgctgacccgaacaatgaagttgccttaacaatcgttccttttcttggatttattgtaacattaggttcttgttaccgattggctaattttaatattgatacacgtcagactgattcgtttataggtttgccaactccggcgaatgcgctttttgttttaagccttccattggttattgatttctcggattcattgataatatttgaaatgttaaccaatcattgggttcttttggggattactttatgcagtgcttatattttaaatgccgaaattccattgtttgccttaaaggttaaaaagtttacggtaaaggataatgttttgcaaattgtatttttattgatttctctggttttggtggtgttgttacagtacatggccattccgttaattattattatttatgtgttgctttcaatagtgaataatatctttttgaaaaagtagttttattggaatggcaagaaaaacgactacccgaagaacttctaactcccgtagatcgaaacctcagaggtcgattttagcgagcggacttcgttttattatttactcttttttagtactgctttttttcgcaacagtttatcattatcgtgatggattggcttattatcttggctttaaatcaaataaagttctggaagaggatgcggtagaaaaacatctttctgatgttagaaatgttcaggttctggaaaatcacaaaggaaaagtaatcggtattgatgtttctgaatttcagggaaccgtgcattggagtgatgttgaggttttggaagaaaaatatccggttcagtttgtttttatccgggctacagcaggaaataataaagtagaccgacaatttatgcacaattggttaggtgcgaaaaaacataaaattattcgaggggcttatcactattaccgtcccaatgaaaattcgatagaacaggcagatttgtttattaaaacagtaaaattacaaaaaggggatctgcctccggttttagatatcgaaagattacctaaaaatcagtcattagacagtttgaagaaaggattaaaacgttggttgaataaggttgaagcgcattaccaagtgcgtccgattatttataccggagagcgttattatggtgatttcctgaaagaagaatttggagaatatttattctggattgcgaactataatttctatagagagaaaattgaagacgattggttattttggcaatttaccgaaaaagcatctttgccaggaattaaacacactgtagatgtaaatatctataacggtgatttagagcaattacagtttataacagtggagtaagagttcagtcttagtggtggtttatttcaataaaactaaaacgatcattattaatagcggcaataaaagtaaaacggagtaaggattggcgaagtttatggtgtagcccatccattgaattctttttggagggagtaatcgtttgtcttttgggttgtagtaaaaacagcccaaataccaattgcttgggtctttatgccaattgtcgtaatcttcctgagttggtttcggttcttctgatttcatgctaattgtaaaatttaaaaaaaaatggtaaaaagtgatttacatttcgctttttaccattcacatataacttcttaaaattcaagtttctttttacgaagttcaaaattttgtcccagataaacacgacgaaccatttcgtcttccactaattcttccggaattccggcttttaaaattccaccttcaaacattaagtatgttttatcggtgatggctaaagtttcctgaacgttgtggtcggtaattaaaattccgatgtttttatttttcaactgtgctacaattctctgaatgtcttcaaccgcaaccgggtcaactcctgcaaaaggttcatccagtaaaatgaattttggatcggttgccagagcacgtgcaatctcagtacgacgacgttctcctcctgaaagtaaatctccacggttggtacgaatgtgttctaagctgaattcttcaattaaactttccattttggcgatctgcgcttctttcgatagcttagtcaattgtaaaacacttagaatattgtcttcaatgcttaattttctaaaaacagaagcttcctgtgctaaatagccaattccttgttgagcacgtttgtacataggataatcggtaatattcagatcgtccagataaatgttccctgaattaggtttaaccaatcctacaatcatgtaaaacgaagtcgtttttccggcaccgttaggtcccaaaagacctacaatttctccttgattaacttcaacggaaattccttttacaacactgcgtcctttataggtttttattaaattatcggctcttaatttcattttttttaattagataatttggaaattagataattagataattaaaactaactcaattcaatttataaatttgatgagacaaattaaaagtaaaataatcaatcagataaatgaattaacaaattattgcattttcaaaaggatctaattgaataggtgcaaaataaataattagagcatttgaaaaaattatcacattatcaaattgccacattttctaattatctttttcttctaaagcttcccaaaattcgtatgctcttctcaaatgtggaattacgatggttccgccaactaaagttgcgatccccatagcttccatcatttcttctttcgtaacgccttctttatggctggtttcaagatggtattttacacaatcatcacaacgcaaaacggctgaggctactaatcctaaaagctcttttgttttaacatcaagagctccgggcgcataagcatttgtatcaagattgaaaatcctttttacaattttattattgtcagccagcaatttttcgttcattttagaacggtaatcattaaattcttttatgatatcagacattttctttcattttatttcgataaacaatcttagaaatcaggatgctcacttcgtagataagcaacattggtatcgctactatagtttgactcactacgtcaggaggtgttacaatcgccgcgataatcaagatgataatgactgcgtatttccagtactttcttaagaattcaggggttactaatcctaatttggttaaaaagtaaatggcaattggcagttcaaaaaagatagcgcttcccagtatacttgttttcaccattcccatataagagtctaatgtgaattgattttttacaacatcactcacagaaaaagtggcaacgaaatttactgacattgggatcacgacgaaatatccaaacagtacccctaaaaagaaaagtaaagaggaggtgaaaataaatactttggcattttttcgctctttttcatataaagcgggactgataaacttccagatttcccataaaatataagggaaactcaaaataaaaccggctaaaagacacatccatacaaagatatttacctgaccttccatttctgtattttggataatgaaattcagctgtgtgatacagatgctgtcggcaaagcctagttggtgtgataaatcacagaaccaaacataagtaaaaaaagtaggtcgggttggaccaagaatgattttatcaaataaatagtcacttataaaataggtcacaaatgccattatcatagtggcaattgtacttctaaccaataaccatcttaattcttcaagatgatccagaaatgacatctcgccaaggtttttttttgccattatacgattccttcttttaaaatgtcatgtaaatgtagtacacctttgtactctccattgtcagcaacaataagctgtgttatcgaaaaatcttctaagatattcaaagcgtcaaccgccattgtttcagaagacactactttaggatttttagacataatatcttttgcagttaaatcagcgatagtatctacgtcatttagcattcttcggatgtctccgtcagtaatgattccgataattttatcattttcgattaccgcagttacacccagtcttttttcagagatctcaaaaatcgcttttttgattgaggtatcaggagtaaccattggttttaacgaatgctcaatcatgtctttaacacgaagtaatagtttttttcctaaagctccgccaggatgataaaccgcaaaatcttcaggtttaaaatcgcgcatttccatcaaacaaactgctaaggcatctcccataacaagttgagcagtggtactgctggttggtgccagattgattgggcaggcttctgtttctacagttgtgtctaatacatagtcagagcctttagctaaaaatgaagttacatttcctgtcattccaatcaggatgtttccgaaacgttttaacagaggaaccagcacttttatttcaggactgtttccgctttttgaaatacagattacgatgtcttcattttgaagcattcccagatcaccatgaatggcttctgaggcatgtaggaacatagaaggtgtgccggttgagttaaaagtagcgaccattttttgagcaataatggcgctttttccgatgcctgtaacgatcaatcggcctttagtttcgtaaatgcgttggacagcttcgtagaaattttcgtccagaaaatcaattagctttgtaattgcttcactttcagatagtatggtttttttggcgatcgccaatatattttcttttgtgatcaaaacagaatatttaaaatttgtatgtataaaagaaagttgtatctttatgtgttgcaaatttatacaaaatatccattaatataaagaatgaattcaaacgaaattgaaatacacaaggaattaaagaagtatttcggctttagccaatttaagggcttgcaggagcaagtcattacgagtattttagagaagaagaatacttttgtaattatgccaactggcggtggaaagtctctttgttatcaattacccgctttaattcaggatggaacggccatagttgtttctcctttgattgctttgatgaaaaatcaggttgatgctattcgaagcctttcgtcagaaaacggaattgcccatgtgttaaattcctctctcaccaaaacagaaattgcccaggttaaaaaagacattacttcaggtttgactaaacttttgtatgtagcgcctgaatcgttgacaaaagaagagtatgtggcttttttacaaagcgtatccatttcctttgtagcgattgatgaagcgcactgtatttcagagtggggtcatgatttcaggccggaataccgtaatctgaaaaatataatcaaacaattaggaaaagtacccattattggacttaccgccactgcaaccccaaaagttcaggaggatatattgaaaaatcttgaaatggccgatgcaaatactttcaaagcgtcgttcaacagaccgaacttgtactacgaagttcgaacaaaaacaaaaaatatagagtcggatattattcgatttattaaacaacataaaggcaaatccggaattatttactgcctaagccgtaaaaaagtagagtctattgccgaagttttacaagttaacgggatcagtgctgtgccgtatcatgcaggtttagatgctaaaacccgtgccaaacatcaggatatgtttctgatggaagatgttgatgtggttgtggcaactattgcattcggaatggggattgacaaaccggacgttcggtttgtaattcatcatgatattccaaaatcactggagagttattatcaggaaacaggtcgtgctggtcgtgacggaggagagggacattgtctggcgtactattcctataaagatgtggagaagttggagaaattcatgtccgggaagccagtagcagaacaagagattggatttgctcttttgcaggaagtagtagcgtatgccgaaacttcaatgtcacgcagaaagtttctattgcattattttggtgaagaattcgacagcgagaccggagaaggcgcagatatggacgacaacgttcgtaatcctaaaacaagaattgaagccaaagagcaggttgttaaattgttggaaattgttcgggataccaagcatatttataagtcaaaagaaattgtgtttaccttaattggccgtgtaaatgctgtaattaaagcacacaaaacagatgcccaatcgttttttgggtcgggttctgaccacgatgagaaatattggatggccttgcttcgacaagttttggtagcaggttatctgtcaaaagatattgaaacttatggtgtagtgaaaatcacaaaagaaggtttgaacttcattaaaaaaccggtttcatttatgatgtctgaagatcatgaatacagtgaatctgaagatgaagcaattgtaactgcaggaaaatcgtcaggaacagccgatgaagtcttaatgggcatgctgcgcgaattgcgtaaaaaagtagctaagaaattaggagttcctccgtttgttgtttttcaggacccttcacttgaagatatggctctgaaatacccaatcactttaacggagctatttaatattcatggtgtaggtgaggggaaagctaaaaaatatggtggtgatttcgtttctttaatcagcagatatgttgaggataatgatatcattcgcccggatgatttagtagtcaaatctacaggagtcaactccgctaataaattatatatcattcaaaacatcgacagaaaattgccgctaagtgatatcgcttctgcaaaaggactttcgatggacgctttgatcaaagaaatggaacaaatcgtttattcgggtaccaagctaaatatcaaatactgggttgatgacatgctggatgacgatcagcaggaagaaattcacgattatttcatggaatcggaatcggataaaatcgaggatgctcttaaagaattcgatggtgactatgatattgatgagttgcgtttgatgagaattaagtttattagtgaggttgcaaactaggttgttttatgaagtttttaaaagctatttttatttttgtcgtattgatatctaccaaatcgtttgcaactgctcaggtttcagattgtttgattattgataaagatacattgcgaattcagtcaaatccattagaagaatatttcaagatacatcctattcctgaaaatttaataactaccgtctctagtgcaaattggagaggttatatcgcctattttaagtttttggaaggaaaactggttgttgaaaatatatataaggaggattacaagaagaatagtaaaggcgaaagcgattttttcttgacttctatttataaagctatttttggtgaaaacaaaaattttgaatgtaacttttattctggtcttctaatttgtccttcaggaaaaatgttgcagtatgttcatatgggatatagttctatatttgaaaattatactttgatagaactaaaagatggagtaaacgtaaaatctaaaaaattaaccgccgaagaatttgtggattttaaaaagaaatattttaaatattataaaaagactgacgaatacaaacaaaaagcaaaagaatttaaagaaatcacggttgaaagtgataaggttttaaacaaattgacacttgaaaactcaaatagtaataataaagaaaataaatatttaaagcaaaaagaagctgattacaaagccgataagaaagtggaatcttttatgtttattttttcaaacgattatatgaaaacaattgaaatccctctaaactaattatatgaaaaaaacatcatttttatttacatcacttggtcttctgctattggcgatgttaatttttagtttttcgacagaaagtaaagaacaagattctagattaattggagtctggaaaggttttgaagttgaaaaacagattgaaggcatagaaaagcactggatacaacaaagatttgaaaacggtacctatgtgattatgtttactacaaaagaggattgccaaatagaaacttttactgaaaaagggaaatggtggacagaaaaaggaaaattttatgaattgtcttcgagtgcaaaaaatccagaagtgtatagttatgaaataaagaatgatgaagtagtagaatttaaaagcataaaactttcaggagagaaaaaggatacctatatatttagcgattataaaattaatttctaattgctgtaaaataaaaaaaaactcaagatataaattccaaattccaagctggttaagcaattggaatttggaatttatttttattggaatttcatcccaaaaattagaattttatccttcaaatacttccccccgatgcggcttcaaagcatctcttacgggaatcatattttcatcggtaacgaccataaaagcgatcgcatgcatatcgtttattattgaaaaccccgtaatgttcaacggaagtttttcgatggcgatatattcttttaagtgaatttcatgatgttcagctgttttagcagaagccggcccacggaaatcccaaattagttttatttttctggacattatttataggtgcaaagtttcaaagaggcaaaggtacaaaggttagtttgaaaattcactttgaaattgtcttattgtccgttcgagcgaagtcgagaccccttatcagtccaagcggagtcgagaccccttgtcagttcgagcgaagtcgagaccccttgtccgttcgagcggagacgagaacctttgtcggttcgagcgaagacgagaacccttgtcagttcgagcgaagtcgagaacctttgtcggtccaagcgaagtcgagaccctttgtcagttcgagcgaagtcgagaacctttgtcggtccaagcgaagtcaagaccccttgtccgttcgagcgaagtcgagaacctttgctacattttgacttcactcaatgtaaaagaacgttatcatcctagttcagataaaattttcaattgatgtattttcatttcaaaatagtacttttgcatgttcttttcatagaaagaaaagctaatttgaataaataaaatacaatgccaagagaacttttacttcaggtaacaccggaaatagcagcaaacgaattgttgttgaaagaccatttgtctaaacaaataaaagtttctcccaaagaaattcaacacgtttcgattttgaaacgatctattgatgcgcgtcaaaaagcgatcaaaatcaatttaaaagttattatctatttgcagggcgaaccttttcaggaaactaaaatagaattgcctgtatataaggatgtttcgtctgcacaggaagtaattgtagttggagcaggtccggcagggctttttgcggcacttcaattaatagagttaggtttaaaaccaattgtactggagcgcggaaaggatgtacgtggacgtcgtcgtgatttaaaagcaataaatcgtgaacatatcgttaacgaagattctaattattgttttggtgaaggtggagcaggaacctattcagatgggaaattatacacacgttctaaaaagcgtggagatgtaacccgaatcttagaattgcttgttgcttttggagcttctgaagacattttgatagaagcgcatccacacatcggaaccaataaattgccaaaaattattgaagatattcgaaataaaatcatagagtttggtggtcaggttttatttgatacacgcgttactgatattttggtaaagaataatgaagttgaaggtgtcgttactcaaaacggcgacaagattttggccaataaattaatcctggcgacaggacattcggcacgtgatatttttgagttattagacaaaaagaaaatttttatagaagcaaaaccatttgctttaggagttcgtgcagaacattcacagcaattaattgacagtattcagtacagttgtgattatcgaggagagcatctgcctccggcaccatactctattgtaaaacaggtcaacggtcgcggaatgtactcgttttgcatgtgcccgggtggtgtaattgcaccttgtgcaacgagcccgggtgaggtggttactaatggttggtcaccttcgaaacgagatcaggttacggcaaattcaggaattgtaatcgaattaaagttggaagattttaagccttttgcaaagtttggagctttggccggaatggaatttcaaaaaagtatcgaacaaaaagcatggcatttggcagggcagactcaaaaggttcctgctcagcgaatgatcgactttacacagaataaagtttcagctgatatttcgaaaacttcttacgttcccggaacaacatcggttgagatggggcaggtttttccgggatttttgtcgcaaattttacgtgaaggctttaaagaatttggaaaatcaatgcgcggttatttaaccaatgaagcaattttgcatgctccggaaagccgcacgtcatcaccagttcgaatccctagagatcctatgacttatgagcatttgcaaattaaaggcttgtacccgtgtggagaaggtgccggatatgccggaggtattatttctgcagccattgatggagaaaaatgcgctttaatgattgctgaggctttaaaatagaatgttttttatgtgttttaacacgttcggtataattagcaaaaaaatgatttaacacatagtcccgaagcatcgggatatgtgtaaaaagagaactaaaaaagaaatacatttctttcacagagaaggctatgcctatttaaataaagtgaaacgccttttttatagatatagtgtttatgtttctatgtgttaaaattaattcacccaaggggttaaaagtagtatgtttgtaaaacctgtttttaactttatactatagtattttttatgaaaaacttcttttctaacttctttggaagaaataacaatccggaatcaatcgtttcttttgatgttctggattctatctatacttatctgcaaaatgagtcaagtcgagtggattttaaaatgaaaggaattcacgacacagtttctgcaacgatgtattcttttccggattcatttgatcatgaagaaggcagggctgaaataaaaaagagcggatttaaaaattcacatgaagttttaaacgaattgtataaaaaggtgaatattgctccactttctgatgatgaaatgctggaggaacctgtttgcaattatcttcatattgagttttactcggagccttcattagagatgaaaaaacatttgaagcacgttttgcaaaattttattatcttcttttgttgtaccaatagtatggagacgaatgattttaggctgctgtattcaaacagttatttttatgactatactaaaggatttttggaagccgaaccaattgatatcgaagcgccaaagaatcaacttcaggaaataggttttaatgatttcaaaacagtacttcagggaatttgcgaatacatgggcatcgagttggcaccaacagttattcgtccttctgccgaaagtttaatgccggatgaggtttcagtcgggcattttagagagtttttgcaattgctttctcgaggagatatggaagaagagttattgaaagatcagtctcagacgctttttgataactttggattggaggaagaggatgaagaatatgattacgaattcgacttttttgaaggaataaattcctggcacagcgactggaaatttgatccggaagatgctgaatatttcatctcagaaatgattggtgaagattttacttttgaatatcctgaagaaacgtacagtcatgatttgtttccgtatattcaagaggaattggcaaaacaagatttagaattaatgagttacgatacgcaaggtgatagttatttgttttttgtagctaacaaaaaggatgtaacccgactattagaattgtccgaaataaccgaaatgggaattgacaggttgatttaagaggaatctttaggggtttgcgttaaaaaaaatgctacgaattcacgaattttattttaaatgattcgtgaattcgtggcaaaaaaattaaggaatcagaataatttttccggtgctttttcggctttcgagataatcgtgggctagttttccttctgataatttgaaagaagttggttcggaaagtttgatttttccgtcagaaatccagtggaacaattgcattgctcttttgattctttcttctttggaatttaaatagctccataaatctcccccggttaaagttttagaaccgtccattaacattctcgggtctaccggttccggatcaccgcctgccattccgaagaaaacaacttgtccacattctttcgtaacttcaaaactctcagttaaagtgcttccgatactgtcataaacaacatcgacgccttttggagtcatttcgaagacttgcgatttccagttttcgttgtaaaggaaaacacgatcagcaccttgttcaaatgctacttttgctttttctgaagatgaagtcaagccaattacttttgcgcctaaaagtttgctgatttgtgttagaatttgtccaactcccccggctacagcgtgaatcaatactgtttcatcttttacggttttgtgactgtcggtcgctaagtaatgcgctgttaaaccttgtagtaaaacagctgctgcagtttcaaaagaaatcgtatcgggtaaaggtaaaacgtggttgatgtttaccgcgactaattctgcatttgcaaaaggaacatcggcgaaagctacgcgatcaccaactttgtattcgggatgattgttagggtctgttacaattccggcaccttcgtaaccggcaataaaaggaggggttccttttaaatgatagttcccttttcgtctgtaaacatcggcaaagtttaatccgatggctttcatttcgactaaaatctcatcgttttttaattgtggattcggaatttcaatgtattccaaaacatcagaatttccgaaagaagaaaaggtaagtgctttcatttttacattattttgagaatacaaattacggtaaaattagtttgcagttttaaaagagttcttaaagatgtgttttggggagaaaaggtaataaaaaaaccgtccacgagagtgaacggcaacttgtattaacctttataaacaagtattatttctttttgagtttgtctttaaaaaccttttcaaatttttctattttgggctgaatgaccattttgcaatagggttggttcttattgttagcataataattttgatgataatcctcagctttgtaaaaaactttaaagggttctatttttgttacaatagggctgctgtagacttttgctttgttcagttcggtaataatactttctgcggcctttttttgttcgtcatttttgtaaaaaataacagatcgatattgcgtaccaacatctgccccttgtctgtttaaggttgttggatcgtgaacggtaaagaaaactttgaaaatttcattgatatccgtaacgcttttatcgtaagtaatctggactacttcggcatgccccgttgttcctgtgcaaacctcttcataggttggattagcgacttttcctcctgaaaaaccggagactacagattttacccctgccagattttcataaacggcttcaacgcaccaataacagccacctccaagtgtaattgtttccagatttgaggagctttttgttttgctgttttgtgcaaatccatttatggacaatgcaaatagactaattaagaataagttcttcatttttagttttatttagtatcgggaataaagtcaagtgcaatcgaattcatgcagtagcgttttccggttggtggaggtccgtcatcaaataaatgacctaagtgtccgccacaacgttcgcatagtgcttcaattctttccataccaagggagttgtcatttttgtaaacaacactttttttgttgtcttgttcgaagaaactaggccatccgcagctgctggcaaatttagctcccgagcgaaaaagtttattgccgcaggaagcgcaataataagttcctttttcatctgttttccagtattttccggtgaaaggtctttcggtgtccgcttcgcgcattacagcataaacatcttcagggagtacttttttccattcggcattgctgacgttgagtttagttgtgtcggtattggaataataaggatttccgggcttgctgattttgttttccatggccgtcgttgttgtattttgtttttttgcattttgcccgcatgcttgtagtataaagagcggaattaaaaagcaaaggctgagaaattgagtttttgttttcattgttaggaatgctttaattctgtatttcaaagatacggctagatttcgcctggaaatgtcgcgtagtttacaattcagatttttttaagtatgttttaacttttattatttacgtaaaacaaaggaattcagttttaaggcttgtatttaaagagttttgaagattaattggtttgtattttgttgatagctagttttttgtgtgattctaagctcgttaaacttttcacaatctctttcaggattttcaagccatttcttttttcgtatttttgtttgatcaataagccctatgatagaagaaaaagtaatactagtaaaccaacaggatgaacaaattggcttaatgccaaaattggaagcacatgaaaaagcgatgttgcatcgtgctttttcggtttttgtcttaaatgataagaatgaaataatgttacaacaacgtgctcatcaaaaatatcactcacctttactttggacaaatacatgctgtagtcatcagcgtgaaggagagacaaatgtccaggccggaagcaggagactttttgaggaaatggggtttaagacagatttaaaggaactctttcactttatttataaagctccttttgataatggcttgacagaacacgagctcgatcacgttatgattggatattttaatgatgatccggcgatcaatacagatgaagtggaggattggaaatggatgaaaatagaagatgtaaaagaagatattcaacaacagcccgaaatttataccgtatggtttaaaataatatttgatgaattttatcattatttagaagaccataaactttaaactaaaccaaccaccaaccaaaatgaaagtaaccatatctagaaaagcacattttaatgctgcacatcgattgtacaggaaagattggacatttgaaaagaatgatgccgtttttggaaaatgcaataaccccaattttcatggtcataattatggtttaacagtaagtgttacaggaaaaattgaccccgaaaccggttttgttctggatgtgaaagtattagcggatatcatacgtgaagaagtagagattccgttcgatcacaaaaacctgaatctggatgttccggaatttcaggatttgaatccaacagcggagcatattgctgttgtgatatggaataaaattaaaaagagaattcaacccgattttgatttagaaattgttttgaatgaaaccgaccgcaattttgtaacttataaaggagaagaataaatgtcattaaaaataggagatatagttccgaattttactgctaaagataatcatggagaagttttcgaaagccaaagtgttttgggacgaaagccgctcgtgatttatttttacccaaaagacaatacaccgggatgtacgacagaagcttgtagttttagagatcaatacgaagatttcaaggacttgggcgctgaagttattggtataagcagtgatactgtaaagtcgcatcataaatttgccaacaaacatcaattgccttttatactattgtctgatcaggataaaaaattacgacatctttttggggtgcgtaacacactatttggccttttgccgggaagagttacttatattatcgataagaatggagtagttattctgatttttgatagtatgaatgcggcaaaacatattcagaaagcaatggaaacgattaaagagctagtattgtagagtagaaaaggtactcgtttcaagctgagataaatgcatttcttttaaatggaaatgcttcaattttagaaatttacatttcatagcgcgtaataaaaagattatatgtacttttgcagtcgcaaatttaaattaaaataaaaatggcaaacgttaaaaacttaaagaaagacatcaatttcgtattaggagatattattgaggcaatttacttatttgaaatgtcaacaacaggaaatcctactcctgaaacgaacgctttggttgatcaggctatcgctgcatttgatactttgatcacaaaagtaaacgctaagaatgttgaaaacaaaaaagcgcacttcaagcaaatcaatatcgaattggaagaaactgctaatcaattgattgctaaaatcaacgaattgtaagcaaaaaaaagcataaaaaagtgcagatttattttggaaaaacgaaaaaccgacttatatttgcacccgtaatgagacgccagcgtagctcagttggctagagcagctgatttgtaatcagcaggtcgtgggttcgagtccctccgccggctcaacgtgaaaccatcactttttagtggtggtttttttttgctcttaagtgaaattaatagagattcgagtttttgtgaaatgaatctgcatatggttttttgaccgcaaagagcgcaaggttttacgcaaagtacgccggtgtagtattggaagcgtctataagaaatctgtgcgaaactcgctgggaattaaacgaaataccctggaagctgtcttttttgtatctgacctatttttgatggaggtgtttgtaatgctatttttcttatgtttgttacttaaccaaaaaacatattaataatggaagaaacatcagtttttgaaaaatttgaattgcagcttgaccaaactgctaaagactttttaaaggaaaccgccaaatgggcttatttcctgtctattttaggattcgtaggaattgggttgatggttttaattgccgtttttgcaggaactattttttcggctatgggaaatagcatgtcgggaatgggaggtcttggaggctcttttggagcgttaatgggatttgtctatgtttttattgcggcgatctatttctttccggtttattatttgtacaagtttgctgtaaatacaaagagagcttttagagagaatgattcagagttgttgaccagttctctggggtatcttaaatcacactataaattcatcggtattttcatgctggctattcttgctttatacggacttgtatttgtatttggaattttgggtgctctgcttggaagatagggggggagatgaaatttgatataaaaaaaatgtcctgaatagtcaggacattttttgttggattttatttttgttgctctttcttgatgtcggaaacgtattttgttagttttttaccgtataatgaattggctacttttggcgtcattgatttctgaatcgtgtccaaaaacttaacattgatatcgtaaatctcagctaaagcaatgtaaggagcgatttcgtgatctttgttgtttagggcaaagttagtagcgtataaatactttcttttgatgttagattcctgtttggtgttaatactgtcaatggctttctggtcttgtctttttacagccttaaatctcgattctaccatagcaaggctttcttcattaaaacgggaatttatctttttatactcatcgtacaattcctgatttttagatccggtaatttttgcaccataaataaaattatcgaggttcgtgtcgatgttgatgttcccaggttctgcgaaaaacataacattgttgtctagtgaattggttactccgcgatccaggaataaatataacatttcaggagattccagttttatgtttgtttcaaatgcagaatttccgtctattttaatgctgtcaatagcaacaagtgatgtgtcaacgattctttgaatatataaagttccgttttttaatccttttatgtttcctgtaaggtgcaaaccgtcagttgattcttttttgctgcaggatgccaatagggcaagagtaacaaaagcaataattgattttttcattggttttttagattttgctgcaaaataaagaaaatagtttgaatgtactgtggtggcattcaaattttgccaaaaaataaatcccaatctatttctaaattgggatttgatctttttaggaataaagagtattacatggagagattaaatgtagttccgttttcgtttgtgtaagtgaattttttgtcgcaatcattattgccataatcaaccactccgtttagtaagttgccctgaatttttagttttcctttggaaataaaatcgcaagtatattttttaattaatgattcctgaacggttaaggttaatacggctccgtttgagctggtgatggtgtggtttccttcagtcatttcatatgtattgtcttccagaacgtaaggagtatcgacacctgcagtttgttttacagtccagtttcctgagttaagataaactctgccttctaaatcagtgaactttccgttggtcacttttcggctccattgtggtacagttgccacagttgttgtgttggtgtattctattgttccttccagttttatgccgttaaaagaatagtcgattctttcgatggttattttacttccggtagtaattatcggtcctgaaagcgtgatttttaatttcccttttctgttgatcagattgtcagtgcatccggttccgtaatcaactgtgaaaactttcggataagaggttgggctttgttgtgtaattgtaattgcgccacagattcccggtgttgtctcgtttgattttgctgaggaagtgttttttgttgtaacgattaacccggttttgatgtccatatcgttaatggcatcgatggtaagagaagctccaactgacgtgacatcagattcaggttgtttttttgtgtcatcattgccagagcaggaaaattgtgttagtgctgttgtacaaatggttaggagtaaaaacactgtttttttcatagtagtttttgttttttgattagattaaaaggcgatcaaatgtaacgaaaaaaatgaaatacaataaaaaaatccgcttggattcagtggggcttaattgaagcttgtttttctaaaaataaaaagccccgcaagtttacttgcagggcctaaattctaattttgaaaacttctcttgctaaaagttttatttaatcatttcaaaacttctttttacgaaagcggttaaagcttctccttttaataagttttgtgacaattttgctaagtctaaagcttgttttaccaagtgttcctgatgtgttttgtcttctgtgttcaggatgcttgacgctaagtctgaattggtatttacaatcaaattgtacatttccggcatattgcccattccgaacattccgccaccacctgactgactcatttctttcattcttcgcatgaattcaggttgggtgatgataaatggagccgcctgactgtccattgcttccagttgtacagagtatgctttagggatgtaagtttctaaagatgtttttaaagtttctttttcttcatctgacaatttagaaatggtgttttcttctttcttgattaaattatcaatgtgatcagagtctacacgtacaaaagttaaatcactattgtcactttcaattttttgaattaagtgtgagataataggtgaatctaagagtaatacttcatatcctttttcttttgctgtttcaatataagaatgctgtgcatctttgtttccggcataaaggacgatcagtttcccgtctttgtcagtttgattttcttttaatttttcttttaattcttccagagtaaagtaggtatcatcaactgttgggtacaacacaaacgcaccggctttttcgtagaatttatcttcagaaagcattccgtattctaaaacgattttaatgtcgttccatttttgttcaaaatcagcacgattttcattgaacaaagcttttagtttatcagctactttacgagtgatatagtttgagatctttttaacagcgccatcagcttgtaatcctgaacgggaaacgtttaatggaatatccggagaatcaataacaccttttaacatcgttaaaaattcaggtacaattccttctacattatctgtaacgtaaacctggttttggtacaattgaattttgtctttttgaatctgcatgtccgaacctaacttagggaagtacaaaattccggttaggttaaaagggtagtctacatttaagtgaatgttgaacaacggctcctcaaactgcattggatataattctctgtaaaagtttttgtagtcttcgtcagataattcagttggttgtttcgtccatgccggatttggattgttgatgatgttgtcgatttcaaccgtttcattgacataatcttcaggagcatcttccggttttggaagtgtttctgttctggttccaaatttaattggcacaggcataaacttgttgtacttgttcaataatccactgatttttgaatcttctaaaaattcaagagaatcttcagcaatgtgcaggatgatttcagtaccacgtgaagttttatcagcaggttctaaagtaaactcagggctaccgtcacatgtccagtgagctgcaggttcatctttgtatgattttgtaatgatttctactttttctgcaaccataaaagcggaataaaaaccaagaccaaagtgaccaataattcctgaatctttagcagaatctttgtatttgtcaaggaattcttcagctcctgaaaaagcaacctgattgatgtatttttccacttcgtcagcagtcattccaagaccctgatcgataatgtggattttttttccttctttatctactttgatttcgataaccggatttccgtattctactttagcttcgccaatactaataagatgttttagttttaaagtagcgtcagttccgttggaaacaagctcacgtaagaaaatttcgtgatcgctgtataagaattttttgattaagggaaagatgttttctaccgaaacattaattttacctgttgtcatatttttttattttttagtttaatgtgatgattttcatttcttcaaatagaataccaattgttttttgggtgacaaaatggcgcaagtgttaattttgaaagaaaataattagattctgaaacccgagatatccctatgaattgtatctttgtggtataataattgttaaacgtgtcagtattaactctaaaaaaaatgtacgaaatgaagaaaattattttcatttgcatgatggccgcgatgttttttgcgtgtaaatcagcttcgtctacaacagcttcaaatggagcacccacactatcgactaaacttgacagacctactcaggtagctattaaaggaaattgggttttaaccaatgtttcttatcctggttctgaatatatcaaggtaaattcttttgatcttgcagattctaaatgcttcatcggaagtacgtggaatttcatttcaaataacaacaaagggtcaatggctttgacagcagcaagctgcaccggatttaattcaccaattgtttggagtgttaataatcagggaatgtttgttcttaaaattttggatgctgggataaaagctaaaaaggtaagagatggatacctattaaaagttgcaggtttgactgataattcatttcagttgatcgataacattaacgtaggtggacaaacaaaagatgtagtgtaccaatttcaaagagccaattaaaaataaaaatataaaaagatgagaaagataaccgttttaagtttgagttgtttgctagtagtagcaagtttttttacaagctgcgattcagtaaaaaatgcaaataacacacaaaaaggtgccggaattggagtagttgcgggtggtatcataggtgctgttttaggaaataacctaggaaaaggtggaaatgctgctttgggagctgcaattggagctgctgtaggtggaggaactggtgctcttattggaaacaaaatggacaaacaagcccgtgaaattgatcaggctttaccaggtgcaaacgtagaaagagtaggagaaggaattcacttaactttaaatgaaaatgcagtacgttttgatactaataaatcttctttgacgcctcaggctaaagcaaatttagataaactggtaccggtatttaacgagtatggagatactgatattcaaatttttggatatactgataatacaggaagaccggaatacaatttgacactttcaggacaaagagctgcttcggtacaggcttatttagtttcaaaaggattaaaatcaagccgtttcaaaacttcaggcttaggtattgttgatccaattgcgacaaacgacacaccggaaggaagagcacaaaaccgtcgtgtagagttttctatcactgcaaacgacaaaatggtaaatgatgctaaagctcaggctggaaaatagtttcaatctacaataaaatttcttaaaagctgtttcataaattgaagcagctttttttgactttagaaattaaacattgtaaatttgaactttcaaatataacccatgctcgacattcaaaatatctctttttcgtacaccgaaaaccctgttataaaaaacgtttcttttaccataaataaaggtgagaatattgccattattggggaaagcggctgcggaaaaagtacacttttaaaacttatgtacggtttgtacaacctggatgaaggcaagattttttataatgaaaaacctgttttgggaccaaagtacaatttgattcccggaatgccattcatgaaatatctggctcaggattttgatttgtctccttatgaaacagttgcggaaaatgttgggaagtttctttcgaatggttttgcaaacatgaaaaaactgcgtgttcaggaattattggagatggtagaaatggagcagttttcaaacgtgaaagctaaatttttgagtgggggtcaacagcagagagtggcgctggtgcgagttttggctttagaacccgaagtgattttattggatgagccgttcagtcaaattgatgctttcagaaaaaatgcattgcgccgaaatttatttcgctatttgaagcaaaaaggaattacctgcattattgctacacacgatagtacggatgctttgtcatttgctgatgaagcgattgtaatgcgtaacggagaggtcctcattaaagacaacccaacaaaaatttatgaagaccctgaaacgaaatatgtagcctcactttttggagaggtcaacgaagttcctactcatgttttggttccttacgaagatcaaatgcataaaactctagtttatccacatcagtttaaaatggttacagagtctaatttaccggtaaaaatcagaagaacttattttagagggaatcactatctcatcgaaacggtttataaaagacaattaatcttttttgaaagtgaaattgacctgcctctcgaacaggaaatatttttaggtttgaattatctataaataacgcgaaaagagatttttaagcgtttccgtttagtttttttgtagcgggcacataaaaaagtaggaaaattcatttatattaaagatatttgctctttaatacttttcttatgatctttgacaaaagagatgataactctaaaatagaaagaattagttatctaaggctccgaaaagcgattggagttttggccggttttttaccattgacgtttataacggcttctttattgagtcgaccagattatttaactcttcaggtgtcttttagtgcatattactacacaaacttaagagatatatttacttgtagtctcagtgtactggcgctttttttaattacttacaaaggatttggaagttctgtatggtggaaattctggaaaaatgacaattttctttctaatcttgcagggattgcatttcttttagtagcgctatttcctactaatccgactcatggcaaaataaagatttattctcttattccagctgatttaccgtttttaagtcagatacacaattatctcgctgtaatagcttttacttgcctggctatgatttctatttttgtatttacgataggacagaaggaaaataaaaacattcccattcattttttaaatgagaattacctctatattgtatgcgggttattgatggctttaagttttattgttttgttgccattattgcagcattggcatgtaaagcaggctacgcttatcagtgaaacatgtgcatttattaactttagtatttcatggttggtgaagggccgggtaatggggtctaaaggcagacttggaagaatagtataccgcgagaataatcaataaccgaataatttgtaaaggggactaaaattaagagaacaggaatatagcgttataattcttaggcttaaattatctataaaataatagccctaaacttatgaattaggtttagggctattattttaaacccgacaggttttaaaaacctgtcgggtttgttacttataaaagtctttagttttttaagtatttttctaaaaactgatcttgttcccaaagtaagtgtaaaatgttttctttggcaacataactatgtgcttcttttggtagaataaccattcttgcggttgctcctaagcctttcaaagcctgatagtaacgctctgtttgtaaagtgaaagttcctggattattgtcggcctcaccatgaactaacaaaagtggtgttttcattttgtcggcattcataaaaggagacattttagtatacacttccggaacctcccagtaattacgttgttctgtctggaatccaaaaggagtcagcgttctgttataagcaccgcttcgggcgattccacaagcaaaaaggttggagtgagtcagtaagttggccgtcataaaagcaccatacgagtgacctccaatagctacttttttacggttaatgtatcctaaagcatcaacagcatcaattgcagcttcagcattggctactaattgtggcataaagttatcattaggttctgtagtgccttcaccaatgatagggaaagcagcatcatcaagaacaacataccctttggttacccaatacacaaacgatccgtaataaggagttgtgaattcatttgaattttgagtcgattgtccggcactgtttctgtctttgtattcagctggataagcccagattaataaaggtaacttttctttttttgctttgtcgtaaccggctggtaaatataaagttcctgaaagttcaagaccatctttacgcttgtatttgatcacttccttactcacatttttaatgctttcaaacgggtttctgaaagaagttattggtgttaagctgttttgttttttgatatttctaaagtaataattcggatattcactcttagactgaatttgtaccaaaactttccctgctttaaaatcttcaatttcaagtaaatcttcttttttgtctttgtacggtgaggtataaatacgtttggattgtaacgtttttagattgaattcatcaataaaaggaaattgtccttcttttgtatatccatctccaatacgataagcgttgtctttttcaatcgccagaacatatttgttgtattcgttctttctggtttcaaaaactcccggatctgagtaaacatcctgttggtttctgtctgtaattacttttggctgttgagctgggtttgccggattgatcaggtaggttttggtgttacgagtgtcgtaccattgatctgttagaaaagccacattgtcattaccccaaataatatcgtcgtaacgctgtggaacttttgctaaagaagttgcttcgcttgtaaaaggagcgttccaaagaaaaacttcatctctaaaatcaaccttattggcaggatcaccttcatctaaagccacaacataagataaggttgcaggtttatcatttctccatgccatttctctttttccttttcgaacagccataaaaccttttggtattatttcgtttaacggaacttcattaactattttgatctcttttcctctcgcatcataaacaatagttctggatgggaatcggtataaaggaactacgtaagaaaatggtttttgaatcgtggtcagcataatataattaccgtctggcgaaattctctctccgtaatacattgcagcttctttaaacaatgtagcatttccgttaagattaactttgtaaagttcagaagtggtgatgttttcaaaattaatttcgtcactttgattttttaacatatcaggaaacgttctgttttgagattttgttcctgctgtattagagataattggaccggttggtaaatcatttttaggatccaataatggttttctgttttttggaagcatttttaccaaaatagtctcattgtctaagaaccagctaaacggatttcctaaattggcattaacagttgcctcagtaagtttcgttgcttttgcagtttcaacatccagaaaccaaagttcgacacctgaatttgtggtgtgagagaacactattttcttgtcatttggagaccaaaggatgttgcttatttttggattttgaggtaatcccgaaacctgaacttcttctttaccgctaatttttcttagctttaaatttgtcgtataagttacagagctggaaatgtttgttaccggattaattcttaaacctcctaagcgaagttcgtcctggtttaaatcatcgagtgttttgtatgtactcctgtacattaataacatattctcctttttagtatccatcgatactgtaggagctttttcgtaatcggctaaatctaagatagattttgatggtttttggtaagtgagattttcttgtgcaaaggcaaaaaagccaatgttaagaaacaaaagtaatgtaacctttaatttcataatgtgaattttaggagtttagagtttggtattcctatatgtttgactaaaatacttcaaacttgttacattttaggtgttatttttgatacttttcacatttttcaggcaaaaactgttttttcagaatataaactgtcagaatcctatttataattaaagtatattgaattgccaattacgaaaaaaacactaatttggacgttaatgttttaaagtatacttaaatttgcattacaattttttaacaaataataaaacaatatgtatcattcaaaaatagcgggcttaggatattatgtcccttcaaatgttgtgaccaacgatgatttgtctaagataattgataccaatgatgaatggattcaggagagaactggaattcaggagcgtagacatattattcgtggggaagataccacaactacaatgggtgtaaaagcagctaaaattgctatagaacgttctggcgtcgccaaagaagatattgattttgtagtttttgctaccttaagtccggattattattttccaggacccggagttttggtacagcgtgatttaggattacgtactgtaggagcactggatgttagaaatcaatgttctggttttgtttatgcgttgtcggttgccgatcaatacatcaaaaccggaatgtataaaaatatcctggtaattggttcagaagtacattcgacaggattggatatgactactcgtggccgtggagtttcggtaatttttggagatggagcaggagcggcagttgtaagccgtgaagaagatttgacaaaaggaattttatcaacgcatttgcattctgaaggacaacatgccgaagaactagctttacaggcaccgggaatgggagcgcgctgggtaactgatattatagcagataatgatcctaatgatgagagttattatccgtacatgaatggacagtttgtatttaaaaatgctgtggttcgttttgctgaagtaatcaatgaaggattagaagcaaatggtttacaggtttcagatattgatatgttgattcctcatcaggcgaatttaagaatttcacaattcattcaaaataaattcaaattgagtgacgaccaggtacacaataatattcagaagtacggaaatactactgcagcctctattccgattgctttgactgaagcatgggagcaaggaaaaatcaaatccggagatacagttgtactggctgcctttggtagtggttttacctgggcaagtgcaatcattaagtggtaaattaattcatcttgcattatatttcatagcctgctcttttttagagcaggtttttttgtgcactgcattgtccggctgagcgaagccgaagccttaacggtttgtgagccttcgactctgctcagggtgatatttaggtttcaagaggatagcgacaacgtttgtcccgctgagcggagtcgaagcctttatggtttgtgagccttcgactccgctcagggtgacatttgtacttcaagaggatagcgacaacgattgtccggctgagcggagtcgaagcccacgttccaataggcaaatcagttatattataagcatatgttttttaaaagatttttcttacttttagttaggtttaattaaaaggtatatgttatgaaattgtattatgtctatatcttgaaatgttctgataatagttattacaccggagttacaaataatattgaaagaagattcaatgagcataagtcgggtttaaacaaggggtgttatacttttagtagaagacctttggaactcgttttttacactgattttaagtatgtgcttcaggccatttcattcgaaaaacaagtaaaggggtggagtagaaaaaagaaagaagctattataaacgatagatgggatgatttaaaacaactggctgaatgttttaatgaaacgagtcataagaaccacgttaataagaaactttagtggtaaataagccttcgactccgctcagggtaacatttaggttttaagaggatagtgacaacgattgtccggctggcggagtcgaagccttaacggcttgtgagccttcgactccgctcagggtgacatttaggtttcaagaggattgcgacaacgattgtccggctgagcggagtcgaagccttaacggtttgtgagcctttgactccactcagggtgacatttgggtttcaagaggatagtgacaaagtttgtccggctgagcggagtcgaagcctttgtggtttgtgagccttcgactccgctcagggtgacatttaggtttcaagaggataacgacaacgcttgtccggctgagcggagtcgaagccttaacggtttgtgagccttcgacttcgctcagggtgacatttaggtttcaagagcatagcgacaacgcttgtccggctgagcggagtcgaagcctttacggtttgtgagtcttcgactttgctcagggtgacatttgggtttcaagaggatagcgacaacgcttgtccggctgagcggagtcgaagcctttacggtttgtgagtcttcgactccactcagggtgatatttaggtttcaagaggatcgcgacaacgattgtccggctgagcggagtcgaagcctttatggttactctaacctttgatttgctttgatcgttcagtttttaatttatatttttgtttggcgtcatcaagctggtgccacttttaaatcaatcaaatgaaaaaaaatcaactggagatagcctgtttcaattacgaatcggcgataattgcacaagacaatggagcagacagaatcgaattatgcgatgatatgcgacttggcgggacaacgccaaatttgataacagcagaaagagttcgggaaaaactaaccattaaaatgcacgttattatccggcctcgtggtggtgattttgtttataccgaagaagaggtccaggaaatgaaacaagatattaaacaacttaaagcactgggagttgatggttttgttttcgggattttaaatcaggatggcagtgttaataaaaagcagaatctggaactggtgcaattggccagcccactttcctgtacttttcatcgtgcttttgatgttgtgaattcgatcgaacaaggattggaagaggtgattgcatgtggttttcaaacgatactgacttcaggacgtgggaagaatgttgaagaaggaattttggatttacaattgattcagaaattagcgggtgaccgaattgaaatcatgcccggaggaggtttgcgctcttcaaacattaaattgcttcaggaaaaattgcagcctactttttatcattcgtctgcgattacagatcaaaccgaaaaagcaaatcctgaggaaataaaagaattaaaaaacttcctgtaaacggaatctataaaataaaggtcgggttttaaaggcagggttacgttcggacaaatgttatgttttgttaagtcacggactagatagattaaaatgatttttaaatagtgttttttttgaaagaattatcttatatttgatatgcgaaacgattaaatataaattatgtacaattcatcaaatttaaaaatcaaagataaagcctggcgaagagtaggtgcaagtcctataccttcaaactatgtttgtcgtttcgcagcatcgtcaggcctctttttaaaaaatataagtttatgcgaaacgacaaacgaacaacaatcagacgcccggatgtgcgtagtctgaaaattcaacccaaaatgagatttaatgaatacagtcagaaaaaagttcctgagatcaaactctgcggaaactggctacagaaacttggcttcgaatttggaggaagagtaattgtgacttgtatgcctaatctggtgattattcgaccgatcgaacagtaaaatcaaaagggatcaattaagttaacagaaaatagaattcaacaaaaaaagtccggaatttgtaaactccggactttttatttttaaataaataattaaactttagtgatgaatacggtattaaagaactccaccgctactgccaatattgctctcttctctatttttacggttcataccgttaatttttgctcctccaaaattgtaggtcagacctaaataaaccgtttgactttcccaggtgctcagtcctgagtgcgggtaaggatattgtgtgtcgaaagaatatttcatagtatcgaaaacatcattaaaacgaaggctgatattcattttatcgttcaataaagtataacgcgtgcctatgtccattttgtacatttggtggctgttgccctgaagaccgtcacttggcccattgtaaagaccaaatagtaaaaagctcatgcgtttgttgactttaaaattagagcttattctactggttaaagcagaaactgtaatttttcgatcgattggcgttcctgtgtttgtgatcgggtttaatgaaaaaacaatacctcgttgattgatacttgaatagtcaatcgacggcgagatatcccaccattttgtgattttataattaaaagaagcttcaaatccataagccgtattatgatcaaaattggtataagatacgattagtttgttgcccactgcctcattataatccgtatctatgactctgctgatctgatcgttgatccccctgacataaattcccaaatttaaactccctttttctaaggtcttagtgtaatttatctctacagaattagtgaattgaggtcttaattcaggattccccaatgtcgttaccataggagtagaaaactcacgaataggttttgtctgttctaaactcggacggtctacacgacggctgtagctcaattgtaatactcaccagagtacctgcaaccaatgtaccatccgttttacgaataaccgattggtagctcattttttgcggagcctgggcaaataaaaaggtaaaagaacttaataatagtaatgctagagtaattttcttcatatatttttcttgattttagaatgttaatcttttatgatcttactgtatttatcggatattcttccaagaacctaaatttattagaaacctaaataaaaagaattccaataaactagtccgtagtaactgaattacctgcatttattaaagctgctttatcgataagtccttgaccagtaggaggagctagtggattttgtccttgtaattgaatcgattttcctaaagcaggtaaaacatcttttagtttacttaacaacgaattaacctgagaacttggtaatgcattatcaccaaatccaatttgcttaccagtagtaagagataacgtaggtatattaatcgtattcaagctcgaattagaggtaatatacaaactattaatttgggttagtagtggaaaagagactgacgctaaagacttattatcgtatatcgtagcctgatcatctcctaatattacgtttaatactggaaatacaattgaactcaatttttcgttatatcttatattaaattcatcctgaactacactaagattgtcaaactttacagcaactagtttagaattaaaacttatatcaagataaaatattctttttaatacgctcaaatctaaagttgtcaggtttgtggtacgagtcacataaatcttctctgtgtgaggcccaaactcagccagtatttgtgccgccgcctctgcatctgtgacatctcccgttataaaaatagttgtttttcctttattttcactacttcccgcatacaaggcgtagggtacacttaaaagctgactggtaccactaatggtgtagttacttcctccttttggatcgatttcagttttgataaagtgtgatccggctccccaatttattccggaaaaagttccggtaacgggtgttcctccaccgatttctatagtagccaatccattgctgtttgttgtggtggtttgtgtttctacataagaagctgtaccagttgctgagccagccaggatactcgttttaatacttactaaagtacctgcaaccaacgtcccatccgtttttcgaacaaccgattggtagttcattttttgcggagcctgcgcaaacaaaaaggtaaaagagctcaataatagtaaggcaagagtaatttttttcatatatttttcttgattttagaatgataatcttttataatattactgtatttattggatattcttccaagaacctaaatttactagaaacctaaacaaaaagaattccaacaaactaatccgtagtaactgaattacctgcattaattaaagctgctttattaataagtccttgtccagtaggaggagcaggtggattttgtccgcttaattcaatacttttgtttgaagcaggcaaaacatttaatagtttacttaatagtgaattaacctgagagcttgaaagtgcacaacctctaaattgaagggacccaaatccatcagctaatgaaactaaagaagatagatctacagaactaagaactggattataatttgcataaaggagcttcattttagccaacacaggaaaagaaagagatgctaatgatacattgcccattatttcaaaatcacttccaccacgtatcactttcaaagccggaaatgacagagatgccaattttggattattataaatatatatcgaattattaatttcactaagattactaaaatttacagaaaccaatttcaaattatcatttatttttaaatctattactttttctaccgcacttaaatccaaagttgtcaaatttgttgtaccaacaatgtaaacattttctgtttcaggtccaaattcagctttaatctgtgccacagcttccgcatccgtaatatctccacctataaaaatagtcgtttttcctctactttgactgcttcccgcatacaacgcataaggtacacttaacaactgacttgtaccactaatagtgtaattactacctcctgttggatcgatttcggtcttgataaaatgggatcccacaccccaatttatttctgcaaaagttccggtaacagctgtccctccacctatttctatagtggctaatccattgctgtttgttgtggtggtttgggtttccacataagaagcagtgccacttgttgatcctaataatatactggttttgatactcactaaggtacctgcaaccaatgtcccatccgtttttcgaacaaccgattggtagttcattttttgcggagcctgcgcaaacaaaaaggtaaaagaacttaataatagtaatacgagagtaattttcttcatgtatttttctgctgttataattttattttttgatgattttaaaagtttttatcgtcttgccttctttacttactgccagaaaataaatcccatagtttaattgctgcatgggtacacttgtttcggagcctgtaatttttaaattttcggatacgatttttcctgtcgtatcaaaaagcctgcaagacaaatcattccattcttctttggtaatgactaaagtaagcacatcaacagcagggtttggataagcagtcatgacaaggtcaatacctttaaattcatcattacccaaagtaattacctcataaggctgttgaacaccttgcaaaacggaaccattatcaccggtcaaactcacataagcgatctgtccaaccgaataactagaactgcccccgcttccggttgcatttcctcctgcaactactacattttgttgagaataaccattggttacaaataaaacagcggtaataaataaaattgaaaaagtgcgttgattttctttcatataattgttttactgattagtcattcaaatatagaataattattatacagaatattattaccaagaaacgattgtgtaaaaaaaaaaacaccagcatttctgctggtgtttcccatacttcacaattaactgaaaaatcattcttccttatgtgtttgatttctaaaaaccaattgtccgtcaaaagcgtctaacaggatgatactgtctgttgtaatttttcctgccagaatttcttttgacagctgatttagtacttctctctgaacgactcgttttacaggtctcgcaccaaactgaggatcataacctttgtccgataagtacgcaatagcttccggagtggcatccattgtaataccttgcagggccagcatttttgtaacactcttcagttgcaaacctacaattctggaaatattatctacggttaaaggtgtaaacatcacgatctcgtcgatacggttgataaattccgggcgaacggtttgtttcagtaatcctaaaacttcaacctttgccgattcagtagccgattcaatacttccttttaagttttcaaacttatcctgtataatctgacttcccatattagaagtcataataataatggtgtttttaaaatcagccagacgtcctttgttatccgtcaaacgaccttcgtctaaaacctgaagcaggatgttaaacgtgtccggatgcgctttttcgatctcatctaacagaataacagaatatggttttctacgaaccgcttcagtcagctgaccaccttcatcataccccacatacccaggaggcgcacctaccaaacggctcacactatgacgttcctgatattcactcatatcgatacgggtcatggcattttcgtcatcaaaaagatactccgccaaagctttagccaactccgttttacccactccggtagttcctaaaaacaagaacgttccaacgggttttttcaaatcctgcaaaccggcacggcttctgcgtacagcatcactcaccgcttcaattgcctcttcctgacctaccacacgtttgtgcaattcgtcttccaaatgcaataatttttctctttcggtctgaagcattttcatcaccggaattccggtccattttgcaaccacttcagcaatatcttcacgggttacttcttctttaatcaaagaattaccagattgaaactccagcaattgcttttgtaacagctcctgacgttcctgcgcttcttttattttaccataacgaatttcggctacttttccataatcaccatcacgttccgcacgttccgcttcgtatttaaatccctctatttcgagttttaccgcctgaattccgtctacaatatctttttctgatttccatctagcatagatctcattacgctcttcttttaagttcgcgagatccatacccaggattttcagtttgctttcttctttttcacgcttaatggcttcaatttcaatctccagctgcatgattttacgatccaatacatccagttcttcaggttttgaattgatttccatacgcagtttcgaagcggcttcatccatcaaatcgatagctttgtccggcaaaaaacgattggtaatgtagcgctgtgacaattctaccgcagcgataatggcctcatctttaatctgaactttatggtgcgtttcatacttttctttaattccacgtaagatcgaaatcgcactttctgtgtccggctcatcaattaagattttttggaaacgacgttccagcgctttatctttttcaaaatacttttgatattcatccaaagttgttgctccgattgctcttaattcaccacgagccaaagccggtttcagaatattagctgcatccatcgcgccttctcctccacctgcacctacaagcgtgtgaatttcatcaatgaacaaaacaatatctccatcggcagaagtaacttcttttactactgcttttaaacgttcttcgaattcacctttaaactttgcaccggcaattaatgctcccatatccaaggagaaaacgattttatcttttaagttttccggcacgtcaccatctacaattcggtgcgccagtccctctgcgatagccgttttaccaactcccggttctccgattaacattgggttgtttttggttcttcgtgttaaaatctgtaatacacgacggatttcctcgtcacgtccgatgacaggatcaagttttccggtacgagccagttcgtttaaatttttagcgtatttgtttaatgaattgtacgtttcttcagctgaagccgatgttactcgttctccttttcgaagttcttcaatggcagccttaagcccttttccagtaacgccctgatcttttaaaatctgtgaaactttgcttttagaatcaaaaattgctaaaattaaatgttcgatagaaacgtattcatcgttcattttttgggcaataatttctgcttcattcaatgctttgtttgcgtctctggaaagtaatatatcacctcccgaaacttttggaaagcttgcaatagtgctgtctaatatttgtaaaaacagcggtacatttacgtttagttttttcaaaataaacggagcaacattttcatctacttcaaaaatagctctaaaaatgtgttcattttcaatctgttgttgtccgttgcgttgcgccagttgctgcgacaactgtatagcctcctgcgactttattgtaaatttatttatattcatatgtataggatttaggattgattattagtgatattgttcgatgtacttaaaattacaatttattggattaaatttttaactttaaatattctaactttgctcaagaacattcaaattatattccatactaaaaatacagacaaaatgtcgcttaaaattgatttttaatctatttttaacgtcaaaaagtcataaaacaagtcaaatatgagttttttaaattcaatcttcggaaattcagagtcagcagacactccaaaaagcaatgtaaattggactcaattaaccgatgttgcccaattaatggaaatcgaagcgatatccaacgaaaaaccggtagtcatttttaaacacagtacaagatgcagtattagccgtatggctttgaagcaattcgaacgtgaatatgctctagaagatactgtaggtgcttattttttggatttaatagcgtatcgtgatgtctcaaacgaaattgcatcgcgattcagtgtctaccacgaatctccacaattaatcctgatcagaaacgggaaggctgtttatgatgtttctcacagcgatattgatgcagaagcattaaaaaataaaatctagattttttttgtaaaatgcgagatgtgaaatgttactaggatagttccacatctcacatttcacatataacatctcacatttaacttaaaaagttccttctgagcctcctccactgaaaccgccacctccaaaatccattggagagtcttctggcttcgtttcgggttttactccaaatgccgaagcaacaattaaggtttccatatttaaaaatgggtttgacgaattcaatcgatccggtttaaatgttagaccactttctttgtctttaagtttctttattgaaaaataagctattgcaaacaaaactatcccgccaattgtcagcgcaatttctattggtaaaaccgaataataaaaccgaatggtataaattgaaaagcctaccgctaaaaaactaatccaaagtaaaattcgatccttagttttcaaagcctgaaccaaatacacaagaggcacgatcaaggtaaaaccataaaagaaaaaagcaaatggtatgtccttccctataacaattggattatccataaaagccaccgaaagttccctaacgactaaataattacaagaaagataaaacaatatcagacaaaaactattggcaaacagaagcccattatagtgataggtttcggttagtttttgaatattcttcttagtaaaaaagtaaaatcctgccgaaaacaatagcgttacaaagggtaaaatcatttttccaatttctcccagttctaatagcccaaagaataaaatagcagccgaagccatacaaaacaccaataatgccggcaaattcaaatatcttctataaagcaaaaaggatttaaatgccacaaaaatggcaattatgagctcgtatccttcggtagtgattgccaccgcaattcctaaattcaaaattgatcctaaaacaaaagcatcgtctaaaccgtgtcggtaatatttcagattagccaaaagttcggctccaacaaaaccaaccaaagcaaaaatgtaacagcagatactgaaaaagaattgctctccgctaagtcctaataatgaaatggctccgcaaatggagagatacaacaatgatcccagcagaaaaaatcccagtcgaaccaaaatattgttttgcattctaaaagcagtcaactcacttttaattctatctttctgatttttatctataaaaccagctgaatacagagaagctgcttcttctattaaagttaaatcatctaattcctctttatcgtatgctgtcatgctgcaatttctttattgaatttcttaattaatttaatgaatagtatgattgaacctataaaatataaaggaagtattaaaataaataattcccagatatcagaaaaattaatactctcaaaaactctaaacacgaatatattgagacctatataagcataaataatcataaaaacatacaatgaaatggctttaagcttgtaacttgctttataaaaataatacgttgacgcagccaaaacaattgcaaaaagcacccaaataccatccgtataagaatccgtcaggttatgaattaatgcaatactggcaatgtgcaaggcaaaagtgtgataaatgatattgaaatgcgtttttaactgaattctggagctgtaaacggtccataaaagaagtaaaacagccaataaaattgccgaataacttaaacttggatcctggtagaaattactgttattgaccaaatcctgtggtgtaacagaaagtccgacataagctgccaaaccagtaatcgcgattgtcaaaacgcttttattatcgaaataatacgcacaaaagaaacttaccagggttggaattaaagttgccagtccgtaatgcgttccgaaggtttggtactggaactgtaaatacccaataaaaatacaagtaagtatagtagcggccaaaaccaagtattctaaaaccggatgctcaaaggtagtttctgttttttgaaatcctctggcatttttaaaacagaagtaaaaacaaactccaataacaatcaacaacaacgaaagaattgcaatatgacctattgaatcaatatttttataaattaatattccgattcctgaagtaaacaacaatacggacaagtacagggctaatttaagttctgcatttagcgaaaaaatattcaatccgcgataggacgtaatttcctcatacttatttttactcaataatcccctctcccaaaggcctttggtggcctgatcatcaaacttattcatactttacttttcaaactaaaaatcaaaaataaactttttttatcaagaacaatcatagtaagtaaaaaaaaacctactaaagtcagtagttcaaacgcaaaacccgagtacttttaaactgtaataatcaaaaaaaccgattcgcatcagatacaaatcggtttttttttgattggttcgcttcctttataaagctgctttcattttatctttaatagcattcaggcataaattgttgatactgccttcatgggtgtgttttgtttctttaggcgattggtaggttccggcttccaattgttctgcaacttctttgtacgcgtctctgaaaggtataccagctactaccatttcgtttaaagtatctactgtaaacaaataatcgtattttttatctttcagtatgttatcttttacgctaatatcttttacagaaaaaatagcaatatccagacaggcttttaagttttgaatcgcaggaaacaaaccttcttttaaaagctgaaagtctctgtggtaaccactcggtaaattattggtgattaaagttatttcgtaaggaagtgactgaatcttattgcattttcctctgatcaattcgaaaacatccgggtttttcttgtgaggcataatactggaacctgttgtaagatgcgatggcaaacttataaaatcaaagttctggctcatatacaaacaaacgtccatggcaaattttgacaaggttgcagcgacactgctcatagcaaaagctaccgttttctctgcttttccacggctcatttgagcagcaacggcattgaattttaaggtttcaaatcctaattcctgagtggtaaaagttctgttgattgggaacgagcttccatatcctgcagcagatcccagcggattctggtcgactactttcgaggctgcatttaacatggtgatatcatcaattaagctttcggcgtaggctgaaaaccacattccaaaagacgatggcatcgcaatctgcaaatgtgtatatccgggtaacaaaacattctgatgtttctctgctgattccatcaacaaatcaaaaagtgtttttacctgttcttttattgcttttaactcgtcttttaaatacaaatgaacatctaccaaaacctgatcattacgggaacgcgctgtgtgaattttttttccggcgtctcccagttttacagtgagtaaatactctattttggagtgtacgtcttcaaaactgttttctatttcgaaatttccaacagcaacatcagcaataatctcatttaacgcgtccactaaagaagtggtttcttcctgagttaacaaaccaatttgcccgagcattttggcatgagcgattgaacctaaagcatcatattttgctaaaactaaatccagttcacgatcgtttcctacagtgaattgttcgatttgtttatctgttggtattcctttttcccaaagtttcataacttagatttttagacttcttagatcgttagactacttcgatttttagatcttaattttctaatttattccaatgttgtcgtttatattgttggtgtttttagccccgatagcagtggaaatccttttacttttttttctttaaaaaaataaaagcttacttcacttaattctcattttaatcggagttcagtgaacttcgtttggaacggataacgggaaatagctcctaattaatattataatttaaagaaaccagttagtattttgatatacaaatcgattccttcttcaatttcgtttacaaaaataaattcatctgctgaatgtgaacgcagggtttcaccaggtcctagttttaaagactggcaactcaaaacggactgatctgaaagtgtaggcgaaccatacgtagttcttcctaaagcgattccggcttgtaccaaaccatgtgcaaccggaattgatgaagcattcagatgcattgatcttggcattacttcggcgtttacattggcttttactacttccaaaatttcggtattggaataacaatcagtcacacgaatatcgaccactaaatcacattctgacggtactacattgtgctgttttcctgcactgatttgtgttacggtcatttttacaggtcctagaacctctgaaattttatcgaatttataatttttaaaccattccattacgggaattgatttataaatagcattatcgtcattttgatgtgcagcatgactcgcagttcctttgacttttacatctaaaactaacaatcctttttcggcaactgctaactgcattaaagtaggttcacctacaatagcgcaatctaattggggtaagtgctttaaaacgctgtttaaaccattctttccgctgctttcttcttcggcagaagctacgataacgatattatgcgataagttctggttttcgtagaagtgtacaaatgttgccagcaacgaaaccagacagcctccggcatcattacttcctaatccaaataatttcccatccttttcgatggctttaaacggatcgttagtataagcctgattaggttttacggtatcgtggtgtgagtttaataaaagtgttggtttattttcatcgaaatatttgttgaaagcccacacattattgttttctctttgaaaaggaatttcgttttgattgaaccaattttcgattaaaagggctgtttggtcttcttcacttgaaaaggaaggggtctcgataagactttttaataaattaattgcttctttagtaagcgtttctatgtttttcatttttattaggtactgaggcactaagattctgaggttataagactgcaaaagtcttggtttcttaggaacttagcaactttttcttttataacgtaatcgttgtatgtggaatctctgaattttgaagcattttgtggtgtccaattttaatttgctgtactcctcttgacaaactattgaagcaattatctaattttggaatcattccggaatggattactttttcttctttaagtttgttgtataaggcttcgttgatttcggttattactgatgtatcgtcttctgaatcctgcaaaacgccttgcttttcaaaacaataggtcaatgtaacctcaaaaacttcagacaaagcaatggacaactcacttgcaatggtatcggcattggtgtttaacaattgtccgtttttgtcatgtgtgatggcacagaaaacaggaacaattccgttttctaataacgtagccaataacttggtattaacttgttttacatctcccacaaaaccataatcaattgtaggatgatttcgttttacagactggattaaatttccgtcggctcctgaaaatccgatcgcattattgtcttttgcctgcaattgtgctacaatatgtttgttgatttggcctgcgtaaatcatgactacaacatcaagcattgcggcatctgtaattcgacgcccctcaatcatttgtggtaccaatccaatactttgagccatttttgtagccgattttcctccaccgtgaactaatactttatgaccttctattttagaaaaatcagttaagaattgctctaactccgttggattatcgatgatgtttccacctatttttattattgtaactttttccatgaggttctaagttgctaaggttctaagggactatgttttttgttcggccgtttcttagcatcttagaaactcagaaccttagtacctcaaaaaattataatttcttcaaaatcttctgtaaaactaactgtgctgaatacgttctattattggcttgctgaattacaattgaattcttaccgtcaagcacttcatcgcttacaataacgttacgacgaacaggaagacaatgcatgaatttcccattgttagttaaagccattttctcggccgtaacagtccagtttggatctgtattggttacttttccgtaatcgttaaaattgctccagttttttacgtatacgaaatcggcattctcaaacgctttgtcttgatcgtgttctattttacagtcttttgtgatttcggggctaagttcgtaaccttcggggtgtgtgattacaaaatccatatctttttgcatttgcatcatttctacgaatgaattggcaacagcctgtggcaaagctttcgggtgaggcgcccaggaaagtactaccttgggtttatgcttggttttgtattcttccatggtaatagcatccgccaaagactgcatcggatgacgaacagcactttccatattaactatgggtacggttgcatgtttcaaaaaccctgaaattactgtttcagcataatctttttctttgtctgccagacctgcgaaagcacgaatggcaataatatcgcaatactgagacactacttctgcagcttctttaatgtgctctgacgcaccggaatccataatggctccgtcttcgaattctaacgtccagccttcgttggtaaaattcatcaccataacattcatccctaagtttagagctgccttctgagtgctcaaacgcgttcttaaacttggattgaaaaataacatccctaaggttttattcttccctaaggcctgatttttaagcgggttctttttaatttttaacgccccttttacccattttgataaggagtcgatatcttgtattgaaatgtaattcattgttttttctttttaatttagataatgtgataattagaaaattggataattgtgtattatctaattaactaattttctaattgactcattagattattttagtaaaaggtatctcatcctttaaagcctttaaaataaaattatcatctagtccatttacgatccaggtttcaatattggctgcttttgcaattgcggcagcttctatcttcgactgcatccctcctgttccatgtgatgattttgattctccaatttctttttccaatatttttaaatcctgtaccaatttgatcgttttcggaatttcatcgtgaatagaatctttggtataaatcccatttgtattggtagcaataatcagaatatcaacatttaaaagaacggctgtcagtgctgccaatttatcgttgtctccaaaccgaatctcatctgtggcaaccgtatcattttcattaataatcggaatgtaattgttttctaccaaaacgtttatggtattgacaatattgactttagactgctctttctcgaaatcagaataagacaataaacactgcgaagtcaacaaacctaaatcgctgaaattctcatgaaaaatccgcatcaaatggggttggccaattgaagctaacgcttgtttcactacaatttcttttcctttactttcgagctttacaaattgctttgccgctgcaattgctccggaactcacaattacaaactcgtattctttgtttaaagctgcaatctgcattccgaggtcttcaatctttccccgtgaaatatgattggtttctttggttaaagtattacttccaatttttaataaaatccgcttttttgacatgctgtattttttttaccgcaaagtgcgcaaagtttttttatgctgtttgtgtttacaaacgcaaagttcgcaaagctttgtttttgataaattccaataatttaaagtctaatattctaagaagtctaacaatctaattttctaattatctaattgcctcaattacctaatttgcccttctccatacacgtaccatttattggttacgagatgctgaagtccgataggaccccgctgatgcaatttatcagtacttatcgctaattctcctcccaggccaaactgacctccatctgtaaaacgtgttgaggcattttgataaacggctgcagtatccacggcatccataaattcctgtgctgccttatcgtctcttgtaataattactgccgagtgtcctccacaatatttatttattttttcgattgccttttcttcagaatcaatgcttccgattactattttataatccagaaattcctcgtaccaaatatcttcgctttgaagtgtttctgtatcttcaaaactttttagcgactcatcaacaattacttctactttatactgttttaattcttcgattaaaatagctgcaaatccttcaaaattgggtagtttcgaatctattaaaaccttatcgactgcgttacaggctgaaattttagaggttttggcatttataatgattttcaaagccaaatctgtatctgctttttcatgaacgtaaacaaagttatttcctcgtccgcttacaataaccgggcaagtggcatgtgcttttacaaactcaattaacttttctcctcctcttggaacaattaaatctactttttgagttggtttttctaaaaaggtctgagtctctgcgcgattaaaattcaaatattccacccagtccttcgaaactccatttctctctaaagcctgatgccatagactcacaattttcaaattcgattttaaagcttcttttcctcctttcaataaaatcttatttcctgatttaaaagctattcccccggcttcgattgtaacatcggggcgggattcgtaaatgattaaaatcgtcccgaaagcggccgttttgttaatcacttttatgccattatcatgaataaaatgaaaacgttcaactccaaccggatcttcttgtgaagccagttgattgagtgatacaatcatttcatccacttttttatcatctacctttaaacgctcttccattgctaagtctgagccgtcataatcagcaagatcttcctgattggttaagataatctggttccgctcctgctcgaccagctgcgccatagcacgcaaaaccagattacgtttttcaattgataatgggttcatttttttggtttaattggttagttgttaattcatgtaatcgattaatcaaatcaacgattaaacaaattaacagtatatggttaaactttaatttttaagttcttccaaactctcttttaaagcttttacaaacgtatcaatgtctgctttttttacggtaagcggcggtaaaattctaagtagatttttgttgttggcacttcctgtaaaaatgtgtttttcgatgattagttttttccttaaagctgctacatcaaaatcaaattctactccaagcatcaaaccttttccttttacttttttaattccttcaacttctttaattttttctaagaaataagctgaaacttcgtttacattcttctgcaactccagtttttcaattacatccagcaccgcaattcctgcagcacatgataaatgactacctccaaaagtggttcccaacaatccgaaacttgcttcaaattttggagagattaaaatagctccaacgggaaaaccattccccattcctttggcaaccgaaataatgtcagcattaattccgtgatgttggaaggcgaaaaatttcccacttcttccatatcctgactgcacttcgtctaaaatcagaaccacatcatgctttttacagactttttccaaagcctgaaaaaattcggttgttccctcgtctaaacctcctactccttgaattccttctataattactgctgtaacatcaccttttgcaagttctgcctcaactaattcgatttgatttaggggtaaaaaagtaacttcctgttgcgcatttattggcgcaacaatttttttattatcagtaaccgcaactgctgcagaggttctcccgtgaaaagaattatcaaaagctacaactcttgattttccgttatgaaaagaagctaattttaatgcattttcgttggcttcagcaccagaactgcataaaaacaattcataatcttctaatccggaaagctttcctaatttctgagccagctctacctgtaatggattctgaatcgcgttggaataaaaccctaactgatccaattggttctttaatttagttacgtaatccggttgtgtatggccaatcgaaattacaccatgtccgctgtacaaatctaagtattctactcctttgtcatctacaattgtacaatctatagctttaaccggagtgatgtcgtataatgggtaaacgttgaataagttcatttgtttttgtttaattgtttaatcgttgatttgtttaatcgattaaccgaattaacgattaaccgcttaaccaacaatttaaaatccgcttggtttcaattttaaaccggtggtttcttctaatccgaacattaaattcatgttttgaatggcttgtcctgaagcacctttggttaaattatcaataattgaagtgatcagaatccggtttccttttttcattaaactaatgatacatttgttcgtctgaacaacttgtttcatattgatgtttgtcgttgtcacagtcacaaaaggctcatttttatagaattcttcgtatctggataccgtctgttccagactttcatcagaaatggtataaagtgtggcaaaaattcctcttggaaaatctcctctgtttggaataaagagtaattcactttcaaaatcatcttgtaactgaactatgctttccccaatttctcccaaatgctggtgttcgaaagctttgtaatgtgacatattgttgtttctccagctaaaatgagacgtttctgaaagtcccactcccgctccggtacttccggttgttgcattaatatgtacatcattaagcaacagatcactgtttgctaaaggcagcagagccaattggatcgctgtagcaaaacaacccggatttgcaatataatttgcctttttgatcgccggtttattcaattccggaagaccataaacaaaatcttttccttcaaaatgggcatctttgttcaatctgaaatcatttcccagatcgatgattttcgtgtggcttgcaaactgattctctttcaaaaacgaaatagattttccgtgaccaagacatagaaacaccacatttacattcggattaaccacatctgtaaagttcatttcgatgtctcccatcaaatcctgatgcgctacagaaagtggttttcctgaattggttgtactgtaaacaaaatcgatgtttactttgggatgatacattaagattctgatgagctctccggctgtatagcctgagccaccaattattccgatattaatcatgatctaaatggtttacagatgaaaatatgttttgagcattacctaaaatcttaataaatccttttgcatcgtcagatgtccacgcattattcatttctccatactgaccaaaacctgtattcattaaatcatttttagattcaattccatcaagtgaaaaatgataaggttttagcgaaactgttacagttccgttgactgttttttgagtatcctgcaaaaaggtttcgatattacgcattaccggatctaaaaactgcccttcatggaataacattccgtaccaatttcctaattgttctttccaatattgctgccatttaccaagtgtatgtttctctaataaatgatgggctttgataataattaaaggtgcagcggcttcaaaaccaactcttcctttaattccgataatcgtatcacctacgtgaatgtctctcccgatagcataagcatttgccagcttttcaagtttgacaatatttttttcaggaacatcttttttaccgtttaatgccactaattctccctgctcaaaatgcaaagtcactttttcttctccttctttttgcaattgtgaaggataagcttcacttggcagaggttcacttgacgttaaggtttctttacctccaacactagttccccaaagtcctttgttaattgaatattgtgctttctcccaagaataatgcactccatttttagacaaataatctacttcttcttgtcttgaaagttttaaatctctaattggagtaatgatttcaatttcgggagcaatagtctggaaaatcaaatcgaaacggatttgatcatttcctgcacccgtacttccgtgtgcaatggcacttgctccaacttttttagcatatttgatcgcttcaattgcctgaaaaacacgttcagcgctcactgataatggatatgtattgttttttaacacgtttccaaaaatcaaatattttatagctttgtcataatatttgtctacaattgttaggtttgcgtgttgtgcacttcctaattcatacgctctcttttcgatagctgacaattcttcttcatcaaatcctcctgtatctaccagaaccgtatgaacttcgtatcctttttcattttttaaatatttcaaacaatacgaggtatctaatcctccactataagctaatacaacttttttcattttttataatttaggccaatactttcgtatttagcaagtttgagattctaatttttagtttattttttaagataagaacccgaaaaacaatgttttattcaggaacaaagcttgtttgatttttttcaatctgcttaaaactgctacgttaaatgggtgttttggcggatctttttgtttgtctttcgggtcatgcaacatccctgtacaaagacacattttgttttctttgctttttaaaatttcgtaattcgtacaggttttacatccagcccaaaaacttggatcggtagtcagttcagaaaaaggtacaggtttatatcctaaatcagaatttattttcataacagccaaaccagttgtaataccaaatatcttggcatcaggatatctttccagagaataatcgaaaacttttgatttgatttttttggctaagcctaaacttctgtaatccggatgcacaattaagccggaatgagcaacaaactttccgtgctcccaactttcgatgtaacaaaaacctgcaaattttccgtctgccaaagcaatcatcgcatcaccattcgacatttttttctgaatgtattcaggagtccttttagcaatcccggtgcctcttaacaaggctgatgattctattgtatcgcaaatttcctgtgcgaatttgaagtgttcttcctgagtaacaacaatagagattttcatttcaatagttgaagttagagttaaaaattaaaacgtattgtttagtttgaaatcctgaattcaatccaataaaaataagtaaaatagaagtaacattctcaaaatcaaaaacttgattaagaaaatttaaaaaacaatatatacttttaggatatgtttgtccaatggacaaatgatgtgatttcaaaatgaaaaatgaatataaataaatacgcggcgaaaaactctgtggatactatagagatagtgtccgtacttcgggagaagttacagctgagtttgtccgtgacaaagaagttatatgtaaacttattttattcatcgactgcaaaagtacactatttttttatttacaaaacaaaaaaataaaattctaacattttttttacagaatgttaatattggcccataaaaaacccgatagttaaaaataactatcgggttcttaagtatttacttttttatattttaatttttagtaaacggtattgcatcaccgctactcaaaataatcatatcaaaacctgttttagcctcattaaatttgaactttagtccggcttcagctgattgaaagacatctttttcattttctaccgcctttactgtaaacttcggatagttagtaatcagaacattcaatgcattattcttttctgtaaaatcgattttcaaaggagcttttgaagttgagtaggttcctaaataaccatccaaaactacatctttttctattttaccgttgctggctgtccaaacattattagcatcattattgtccggaaaaacatgatccggatcaagcatgatactttctatttcttcagtagaattgtgtttaaacgtccaaacattgttacgttgccaaacttcaacaggcaatttaactcttgtcactttcccgcttttagttttcacatctaaaataaccggcataggcattttatcgaaattctcaactgtgattgcaactccctttgacggatcattttttatgtacttaattgaattgatcccctgattaaagcgccaattgtttacaaaccaacttctccagaaccagcttaaatcttcacctgcaacgttttccattgatcggaagaaatcatccggctgaggatgtttataagcccaacgttcgatataagtacggaaagcaagatcaaaacgctcttttcctaaaatctgctctcttaaaattaccaaaccagaacccggcttaaaataacacagcatcccaatattagcctctttcatattatcaggagaactcattatagtttccagatccggtcttgtgaatggctctgctaatttgtgcaaattcgatggcgcttctttatattcgcccttattaaattcctcagtgcttaatgaattaataaaagtattaaatccttcatccatccaggcaaacaatctttcgtttgaacctacaatcataggaaaccagatatgtccaaattcatgatcggttaccccccataaatcttgtccttttgactcccagctacaaaacacaataccaggatactccattcctccttcatttcctgcaacgtttgtggccaccggataaggatattcaaaccattttttagaatagtgctcaatagatgcttttacatattcagtagaacgcccgtaagcttcttttccgccactttctaccggataagctgataaagccaatgcctttttaccactaggcagattaattttggcaccgtctaaaacaaaagcagccgaagaagcccatgaaaaatcacgagcattttttatttgataatgccatgttttctctcctgttgtttttgaatttgctgttgcagcaacttcttcggcagaacgaattgttacggttttatcgctttgccccgcttctttataacgcttaagttgttctgcaggcaatacttctgctccatttattaattctcccgatcccacaacataatgatttgcaggtaccgttagttttacatcaaaatttccatactctaaataaaactctgatgcacccaagtaaggggcagtattccatccttttacgtcatcgtacacacacatacgcggataccattgcgcaattgtaaaaattttaccgtttttagtttccaaaactcccattctgtccgatccttcaaaaggcgcaatgaaagaaaactcaattttaatttttacagctcccccttttgatgctaatgtttccggaagaaatatctgcattctggtatctgtaactacatattttgcttcaatttcagtctttttctttccacctgaaattactttaactgatttaattttgtttcctccaccaaaaacctgtccctgagcaccgttacggcttcctgatagcggcaccaccgcattccctcttgaatcacttttgaataaattctgatctaaattcaaccatacaaatgacattttttccggactattattggtataggtaatttcatctgtaccggtaatctcatttgtagttccgtttaattttgccgttatctgataatcggctctattttgccaatattcaactcccggctgaccgtttgcagagcgcgttggtgtcccatttttggtataaaaatttggcccaaacgcatcgtggtaatcgtaattgttaacaggatttactactgttgcaggaggtgtttgctgtgcccagacagaagaaactccaacaaacaaagccatggttaataaggcttttgaggattgttttttcataatttttagctgtttatgtagcaaattaatgaaaaaaaaagctatttacagagaaattataaaacgtaaatccaattttagcaaaattttatgcaaaaaatattttaagctattttcctaaaaaataaaatttataaaatatatttacatcaacatatcagtaatctttttcaatttcaaacactttgaatacaactataaacaattcagcgataagcgtctcaataaaacattctggagcagaattattttcattaaaagacaatcaaaataaagaatacatatgggaaggtaatccagacttctggggcaaacattctccggtacttttcccgattgtgggcaccctgaaaaacaacacttatacgattgatgaaaaagaataccaattgccgaggcacggttttgcccgcgatatggactttcaattgatcaacaaaaatgaaaacagtgcaatctttgctctaaaatcaaataccgaaacactccaaaaatatccttttgaatttgaactacagcttatttacagcgttgaaaacaccactttaaatattgagtacaaagtaatcaacacaggaaaaaccaaaatgccattttcgattggagctcatccagcgatagcattaccaggagattttaaaaattatgcattccaattcgaaaaacaagaagttttagaatattatcttttagagaatgatttgatttctagtcaaacagaaaccttgaaaaataaaaatggattaattccgtttgactaccaattattcgaaaacgacgcattaatttttaaaaccctagaatcaaaatcgctaacgcttattcaaaactccaaaccctatgtcaaagttgattttgaagattttccgagtttaggaatctggacaaaaccacaagctccttttatttgtatagagccctggcttggatactctgacaccgatgaaaattcgggaaatttattcgaaaaagaagggattttagttttagaagccaatcaaaactttacttcaaaatttagtatatcaatattataatctacaaaaaaatgctggaatttaattttactccattccctgtaatcgaaacagaacgtttgcttttacgaagaatcacaaatgacgacgtcaatgaagttttcgaattgcgttcaaatcctgaaacaatgaaattcatccctcgtcccttagtcaaagatgctgaagatgccttagcacatattaagatgattgaggacaaaattgtcgcaaatgaaggaatcaattggggaattactctaaaagacaactctaagttactgggaatcattggttattacagaatgcagccagagcatcatcgtgccgaaataggctatattttactacctgaatttcatggaaaagggatcatcccggaatcagtaaacggattgatcacttatggttttgaagaattaaaattgcattcgattgaagcagtaattgaccctgaaaattatgcctctgagaaagtattacaaaagtgtggctttgtaaaagaaggacattttaaagaatgtgaattttatgatggcaagttcattgatagcgtaatctactcattattaagcaataaaaaacattagatttttttgaacaaaaaatattcctgttaaattaatgattccggataatagtaactattggtttgcgttatatttgcagtcgaaataagaaaaaagagcttatttcgacatcacgaaagcccgttttatgaaaaaaatctttattgcccttgttcttttcttttcaattcagtctcaaagtcagacttttattaagtttaatactgcaaccgctttattggcagtgccaaatgttggagttgaaaccagtattggaaaaaatctaacttttagtgttgacgtaatggcatcattttgggagtcttttaacggacatagtccaatgaaaatctacacactaacacctgaacttcgttatcattttaaagaaaactataaaggtttttacgtcggtggccatgcaggaccagatatttatcaaattcaaaaatggaactattggggatcaaaccattacgaagacggttttggttatcgtttaggagttacagttggatacaatattaaattaaacgataaatttttactggatatttttgcaggaggtggctggcaccaaggtttctatcatggatactacaatgatggaactccgggaagatatgaaaaaacgcaaaactggaacaaaagcggcgaatggcttccataccgcggaggtgttatgatttcttataaactataagttacttcgccaatttaggcagtgattttacatacaaatcttccactttctttcgtgcccaatcggtttttcttaaaaaagtcaaacttgattttacacttggatttgaaataaagcactttatcggaattaattctgccagagtatcaaagccatagtattctactaatgcttctactattttctgaagcgttataccatgtaaaggatctttcgattgattttgcattttatacttttaaataattattaaaaagaccgtactttcaaaaagcacggtcttttttttacaaaactactaaattaatttacatctactcccatcgtttgtttaaaacagaaacttaaacccaaatgaaagtggagaagtcaaatttggtctgcttccggccaaagcagtgttgtaaaaaggatcaacatttgccacatgtgctaatccgaaattggttactgtggttttctcaccgcttttaggctccaatgttgttgacgtaaagtttgccagatcgtatgaaaactcaaccgagaaatttttactaataaaataatcaaaccctcccgaaactgataagccatattgactaatcttcaaatcactttctttctcttttcctgtgataataggagctgccaattgcccaaagaagtacaacgaacccgcaacattccaatattttctagccaacggctgaataacaagcaaatctgtttttgccacagttccggcttttgcatcagcttttatgttaataataccaaatcccgctcctactgcaacggaaggcgttacaaatgtccctacaattggcaatacagaaagatttgtattcttaacgtcgccagttttagtttgttgataaccaaattgcgatgttgcgaaccaggttccttttaagccctgatttgcatcctgagcttttgcggttaagctaataaatgcaatacttactaatgttaaaatttttttcatgttttagtatgttttaaattattcaacaaacttatacgtaagcattttctttaggtatgatcaaaatcatagattaaaaaaaaactttaattctttcagattttattaaagtttttcatttttgttttacatttgtacactatgttaaaaacagtcaatatacttaataaaagagcccggtttgattatgaaataatcgatacttatactgcgggaattgttttgtcgggaaccgaaattaaatccatacgactaggtaaagctaatattactgaaagcttttgcgaatttaacaatatggaactctttgccattaatacctatattgaagagtattcttttggcaatcaattcaatcataaatccagaagcgaaagaaaattacttctaaacaaaaaggagctcaaaaccttgcataaaaatgttcaggcaaaaggacttactattgttcctttgaaattatttaccaacgaaaaaggacttgctaaactgcaaattggtctttgtaaaggaaagaaaaactacgacaagcgtgaatctttaaaagaacaagatacgaaacgcgatctggaccgaattaaaaaagcatacaactaaaaaacaaacctcctgtaaaaccttaacaaataggcttttattgatgttttatcgttatttttactataaacaatttaaccttaagaaaaacaataaactaatctggacaggtactactaaatcaggatatgttaccaaccttggtcaaaccgttgatgcaattatgcaagcagtggtaaaagaaatgaaaaaagacggttcactccctcctaaatagtattttgaaaagcaatattaaaatattgcttttttttcattaaaattatgactaaatttgtcaagacaaattaaataaaataaaaatgaaatcgctccttaaaaatgcaagagaacaaaaaggtctaaaaacccgcgaagtagcacaactacttggcatcgatcaggctttaataagcaaatttgaaagcggttcgcgaaaaccgaccaaagatcaaattgttaagctatctcaacttctagaaatagactatgaaactttaatgatcgcatggctgaaggaaaaaattctatatgaaattggtgatgatgaatttgctttaaaagcgcttgaagttgcagagaaagaaatcaaatacaataaaacagtctccaaattaaaattatcaaccactttagaaaaaatccttagtgaaatagatgttttaaaagaaaaactggatacttacagacagtttgatagctataaaatcagtcaggcacttgaactcgaatatacttttgaaagcaatcgaattgaaggaaataccatgacgcttcgcgaaaccgatatggtcatcaacgaaggtttgactatttcaggaaaaagcatgagagagcatcttgaaaccattaatcatcaggaagcgattggttttatcaaagatttaatgcaaaaaagcaacagcttaaatgaacgcgatcttttatctatccataatttaattttgcgaggtataattccagaagatgcaggtcgttatcgaaaagtacaggtcatgattcagggaagcagtcacatgcctccacagccttttttagttgcaaaggaaatggaagagtattttatttggtatgaaatcaacaaaaataaactacatccggttattcttgcagccgaaatgcacgaaagactagttacaattcacccttttattgatggaaacggcagaacctccagattagtcatgaatttaattttaatgcaaaaaggttatctgattgccaatataaaaggagattatgaaaatagaatgcaatactatcaatctctggaaaccgctcaaacaaaaaaagacaaagaagattttttattctttatcgccaaaatcgaaaaagaaagtctggagcgttatattagtattattggccaataaaataaaacccactattgctagtgggttttattttaatttttatcttctaataaaggaacaaatcgaaattctccaaactcatgtttttcaaattgtgtttcattctttcgaatcaatagggtcataatctgaacatcttctcctaacggaataaccaaccttcctcctattttaagctgcgccattaaaggctgcggaataaacggagctcctgccgtaacaataatactatcaaagggtgcataacttggtagtcctttataaccgtctccgaaagacaggtgttttgggcgaatgtttaattttggaaacaaattagaagttgttctaaacaactcactttgtctttcaacgctatacacttttgctcctaacataaataaaacagcagtttgataccctgaacctgtaccaatttctaaaatcttatgatcttttttaacctccaacaattgcgattgaaaagcaactgtatagggctgcgaaatagtttgccccgcccctataggaaatgccttatcctgatatgcataatcttcaaaacttgaatttaaaaaaaggtgtctcgggattttttttatcgcatccaaaaccgctttatcagtaattcctttttgttctaaagtgcttactaattgattgcgaagtccttgatgtttggcagtatctttcaaaatggattggttttatttttgcaaaaataggaaagtaaatcaattttaaatgctttcacgcagaatgttttcaactcagaaacttctttcaaattaatgttatccgaaccatttaccattcaaatgcttgtatcaaccgttcgtcattttttttaaaattttcagctgatgtgttgctacttttgaaacatcaatcagcaaataataatttaaaaaccaaaattatgaacacattaaattttaaaactccgaccgaagctctaaaaccattagctgttggttttgcaatcggacttattaccaatttcattagttttttaattcacttgtaaaaaaatcaatcaatcaatcaatcaatcaatcaatcaatcaatcaatcaatcaatcaatcaatcaatcaatcaatcaatcannnnnnnnnnnnnnnnnnnnnnnnnnnnnnnnnnnnnnnnnnnnnnnnnnnnnnnnnnnnnnnnnnnnnnnnnnnnnnnnnnnnnnnnnnnnnnnnnnnnaatcaatcaatcaatcaatcaatcaatcaatcaatcaatcaatcaatcaatcaatcaatcaatcaatcaatcaatcattaaaactaaaaattatggaaacccaaaaagaagtaaacgtttacaaaatcgttaaatcatttatcgtaggatttataatcggatttgcgctttataaatttatcactgtaattgtattcaattaatttaatcctcaatcaaaaaacatcaatcatgaaaaccaatgcattaaaaaaaatcgcttttctatctcttggaattgtttctacaggaaatttatgcgcacaaaacaaacctgaaaaagccccctctgttccggctaaagatacttattttggaattacggtggaggacaaatacagaaaccttgaggatttaaaaaatgaacaaacactaagttggttaaaggctcaggcagattacacaaaccatattttaaactcaattcccggaaaaaaaacgcttattgatgagctgacctccataaatgacagagttaccgaagcgatcagcggattgcaaattatggaagacggcacttatttttatcaaaaaacaactccaaaagatcaggtggcaaaactttataaaagagctggtctaaaaggaaaggagacgttaatctttgacccacaaacgctaaaaggcgaagcaaaagacatctttactattagttctttttctccgaataagagcggaaaactaattgccgtaaatatttctaaaaatggtggtgaaatgagtgaaatgcttttaataaatgtagccgataataaaattttagccgataaaattgacaagctaagatttggaaatgccaattggttaaacgatgacaaatcgtttttatatgcacaatcaccaacagccgatattcatgatgccaaagcacaattgaatattgtaacaaaactgcacgttataggaaatgatattacaaaggataaagtaattttttcgaaggccatgtatcctgaattaaaaattgcagaagaagaaatccctattatgggttatgacgcagacagtaagatcctgtttctgatgccttattctgtaaatccgaacatgaaaatgtttatcgccaaaggttctgagttgaataatgccaaaattagctggaagttattaacagacagaaaagatgaaattaaaaatttctctttcagcgataaagacatttattttttcacgagtttgaatgctccaaaatttaaagtaacaaaaaccagtatggctaatccaaatttagcaactgcaacactagttatccctgaagacaaagaagccaatttgaaccctattacaattaccaaagatgggattttttacaccaaaacaaaaaacggaatcgaaagtaccttattcttcactgattttgaaggaaaaaaacacagcgaaattaaaacaccaaaaaaatctgctactattgttttaacttctcgaggaagtaaatattcagacttatgggttcgaacaacaggctggacaaccaaaggagaacgttataaatacgatgtaaagaaaaacaattttatcagagaagaactctctacgattactgaatacccggaattcgaaaattttgaaattgaagaattaatggtaaaatcgcatgatggtgtcgaagttccactatccattatttataaaaaaggaattaaaaaaaattcaaacaatcctgttttgttctatggttacggtgcctacggaatgtctatgtctcctagtttcaatcctagtctgcttttatgggtagaaagaggcggaatacttgctgttgctcacgtaagaggtggtggagaactaggagaaaaatggcatttggaaggtcaaaaaagcacaaaaccaaatacttggaaagacgtaattgcctgcacggaatacatgattaaagaaggatatacaaatccgacaaaaacggcaatctacagtagaagcgctggtggaatttttgtaggaagagccatcactgaaagacccgatttatatgcagtagccattccgggagtaggaagcatgaatactgttagaggcgaaaatgcaccaaacggtcctgcaaatacacctgaatttggaaccatgaaaatcgaagatgaagccaaagcccttatagaaatggattcttatttacaactaaaagaaggtgttaactatcctgcaaccttaacaacagcaggatttaatgaccctagaatcattgtttggtctcctgctaaatttgccgcacgactgcttgaggtaaacacgtctaaaaaaccaactttgttaaaagtagattatgaagcaggtcattttggcggagcttcaaaagcaaaatcatatgaagaagttgccgatgttttaagctttgcactatggcaagtgggacatccggattttcaacctaaaaattagttatttaaaatgtaactttggcaatgctggcattgccaaagtttttaaaacttaaaattatgatcaaaataattatagctttgactgttgcaataagccatttgttatttaaaattttatcttaatgaaattaaccgtaaaaatcctggtgactctagtcgttatattctgcctgctctttataggcgcttttatcgcaggaatggtttatggatatcaagtaccgctgaaagcaaaataacttataaaaatgtttcaaaaaaagaatcacgttttcgttttaattcagatcattatatggactatctattccggaataatttttattcctcaaattattattccggaatttaatatattgagatacaaaaactggcaacttttattagactacttttctagtgtttgcgtgcttacattcctttcgatagctttaaaacatgtttatgaccgatacataaaactggacgattttaaactttgggaaattattaaaatgctttttctaattttcgcagctgctctctttttctttgggatactaacggcatataattatctaatgatcaattatgtttatgaaaaccctgaagtttttgatcacccttctcaatctgcaaaaagacaggttttctttatttttctgatggcatttcttttctttctttggataattgtgtacaccatttacaaaacaacctcgcaaatcaagaataataaaatggatcgaatggaaattgaaaacactttaaaagattctcaactgaatgctttaaaggggcaaatcaatccgcattttatgttcaacagcttaaacaatattcgcggactaattctggaaaatcctgaaaaatcgagagaaatgatcactcgattgtccgaaatgcttcgatattccctgaccaaaaacgagattacaacaattgcactggaagaagaaattgaaatggtagaaaacttcattgaaatttcaaaaattcaaatggaagaacgcttaagttttacttctgaaatagacccaaatactttaaagctgcaaatcccccccatgatcattcaaatgctgatcgaaaatgcggttaaacatggaatttcaaaattaaaagaaggaggtcaaattgcattagaaaccaatctggaaaacaacagtttgactattgtcgtttcaaacacaggaatacttaccattgaaaaagattccacacaattaggaatcaaaaatatcgaaaaaagattgcatttaatttatggcgagaaagctcgttttaaattacaggaaatagaaaataaagtaattgcaaaaataataattccaatactttaagtatgaaaaaaataaaagctgttattgttgaagattcccgtctggccagaaatgagcttaaagaattaattaaaaatcatccggaaattgaaattattggagaagcagaaaatgtagattcaggctttaaactgatacaggaaacccaaccggatttactttttttagacatcaatatgcctgaaaaagatggttttgaattgttggaaatgctcgataaagttcccattaccattttcacaacggcttttgacgagtacgctattaaatctttcgaatacaatgctttagattacttactaaaacctataaatccaaaaagatttgctcattcaatcgaaaaagtaagtcaaaatctaattgaaaaagaagaaaaaagcagtaagaaactgacgccaaacaatcagatttttattcgcgatggcgagaaatgctggcttgtaaaaattgccgatatctttctgtttgaagtcgatggcaattacaccaaaatattctttcaggatgaaaaagctgtacttaataaatcattaaaccatattgaagagaagcttcctgatgattatttcttccgggccaatcgaaaccaaattatcaatatagaatacatactcaaaatagacccttggtttagtggtaatctgctcgtacagcttccaaaagaagtaaaagtagaaatatcacgaagacaaaccaataactttaaagagaagttaagtatgtaaatacatttaaaattgttcaaataatttcgactttgtcatcactaaacttttactttcaacaaataaattatatttttgtttaaaatacattctcatgttaaaagtaggagttttaggtgcaggtcatcttggtaaaatacatttacgcttattacaacaatctgaccaatacgaattagttggattttacgacgaaaatcaggaaaatgccgaaagaatctcaaaagagtttggctataaaaacttcaacacaattgcaaaattaattcacgctgtggatgttatcgacattgtgacaccaactctttcacactacaaatgtgctaaggtagccatcaaatcaggaaaacatatctttatagaaaaaccaattgccaatactgttgaagaagccgaagaaatcattgctttggcggcagaacatcgtgtaaaaggtcaggtaggtcatgttgaacgctttaaccctgcgttcattgctactaaaaacatgatcgaaaatccaatgtttatagaaacacaccgtctcgccgagtttaatccgcgtggcacagacgttcctgttgttttggatttaatgattcatgatatagatgctattttgagcgttgtaaattcaaaagtaaaaaatatcaatgcaagtggtgtttctgtaattagcgaaactccggatattgccaatgccagaatcgaatttgaaaatggatgtgtggctaatctaaccgcaagcagaatttcgatgaaaaacatgcgtaaaacaagattttttcaaaaggatgcctacatttctgtagattttctggagaaaaaatgtgaagtggttcgaatgaaagacgctccggaaattcctggtgattttgatatgattttacaaaatgcagaaggtgtaaaaaagcaaatctattttacaaatcctgatgtggaacaaaataacgcaattttagatgagctggaatcatttgccaatgcgataaaaacagacacaactccggttgtaactctggaacaggcaacagatgcattacgagtggcctatcagataattgattgtttcgataaataatttggaagttttaaaaatataaattagccacgagttcatcaattaatttgtgaactcgtggctaaaatcataaatataatatcaaatttaaatgaaaactatagctgtaattggtgcaggaacaatgggtaacggaattgctcatacatttgcacaaagtggttttgtggtaaaactaattgacgtttctgaaaaatcattagacaaaggaatggcaactattgctgccaacttagaccgaatgctttctaaaggaaccatcactcaggaagaagttaccaaaacgatcactaatattattacgtatactgatattaaagacggagttgttggtgtggatttagtagttgaagctgctactgaaaatgtagagttaaaacttaatattttcaaacaattaaacgaagcttgttctcacaacaccattctggcaacgaatacttcttcgatatctattactcaaatcggagcagttgtagcacatcctgaaagagttatcggaatgcactttatgaatccggtgccgattatgaaattggtcgaaatcatccgcggatacaacaccagcgatgaagttaccaaaaccattatggacttatctgtaaaattaggtaaagttcctgttgaagtaaacgattaccctggttttgtggccaatcgaattttaatgcctatgttaaacgaagctatcgaaaccttatacaacaaagttgcgggagtttacgaaattgacacggtaatgaaattaggaatgggacacccaatggggcctcttcaattagctgattttattggtcttgatgtttgtcttgctattttaaatgtaatgtacgacggttttaaaaatccaaaatacgccccttgcccactattggtgaatatggtgagagccggaaagttaggagtaaaatcaggtgaaggtttttatgattatagtgaaagtaaaaaagcagagaagatctctaaacaatttatactttcctaaaaaagaaataccatgtcgatagcatcgaatttaaatacaatcaaggcagccttacccgaaactgtaactttagttgccgtttctaaaacaaaaccggttcccgatttaatgcaggcatatgatgccggtcagcgcatttttggagaaaataaaatccaggaaatgactgaaaaatgggaacaaatgccaaaagacattcaatggcacatgattggtcatgtacagtcgaataaagtaaaatttatggcgccttttgtaagtttgattcatggtgttgacagcttaaaactgttgcaggaaatcaataaacaagcattgaaaaaccatcgaattattgattgcctgcttcaaatacatattgccgaagaagaaactaaatttggtttagacgaaaacgaattaaatgaattactgtcttcacctaaattcaaagaaatgaaaaacatacgtatcttaggattaatgggaatggcgacttttacagaagatcaaaaccaaattaaaaaggaatttacacatttaaaatctatttttgattccataaaagaactgaaaactgaaaactgcaatctgactactgtctctatgggaatgtccggagattatcagcttgccatagcatgcggcagtacaatggttcgcattggaagcagcatttttggaggaagataagtcctaattgttaattgtcaattgtagattataaactgattactaaaaactgagactgaatactaatttgtacgcaatactagacatagaaaccactggaggccagtttaatgaggaaggaattaccgaaatcgccatttataaatttgatggacatgaggtaattgaccagttcattagtcttgtcaatcctgaaattccgattcagcccttcgtggtgaaattaaccggaatcaataatgctatgttgcgctctgctcctaagttttttgaagttgcgaaacgaattatagaaatcactacagactgtattattgtagcacacaatgcttcttttgattaccgaattttacgtacagaattccgacgtttgggctacaattttgaagccaaaactctttgtacagtcgaacttgccaaaaaattaattccagatcagccttcctatagtttaggaaaactggtgcgagcacttggaattccaatggcagacagacatcgtgccagcggagatgcaatggcaacaaccaagctctttaaaatgcttctggaaaaagacctggaaaaaaccattgtaaaagattttatcaaactggaagtagaaaaaggaattgccccaaaatttttggatattctggcacaaatgcctgcgaaaaccggtgtttattacatttataatgaaggtggaaccctaatctacattggaaaaagccaaaacatcaaaaaaagagtcaatcaacattttacgggaattaccaccaaaagcaaaaaaatacaggcagaagttttcaccatcacgtatgatgaaacgggaagcgaattaattgcactcttaaaagaaagtgaagaaataaaaataaatcgccctaaatataatcgttcacaacgaaaaacgatttttcagtatgctttatatgcagagaaagacactaatggttatatcaatttaaaacttgaaaaagcagacggtcgtaaaaaagaaattacctcatttggtactttacaggaaggtaaaaatgctctgttccgatttacgtcaaaatatcatttatgtcaaaagctaacaggactttatcaaaccaaaaaagagtgttttcaatataaaatcaaagaatgtgatggtgcctgtattgaagaagtaacacctgaagtttacaatgcccgtgtacaacaatttatcgcggaaaacagtttcgaaaataaaagcatgattttgctggacagaggccgaaatgtcaacgaaagaagcgccattttaattgaaaatggtctttataaaggatatgccttttacgatctgaattatcagattacaaacatcgagattctaaaaaacattttaattccgatgcagcataatcgcgatgtgaaaaacattattcaaagctacctccgaaagagtaaatcaataaaggttcttcatttttaacactgcaaaactttccttatcttcgtgaggatgaaaaaaataaaatcaaaatacgaaatcttccgggaaaaagtcaaaatcatcctctacgggacagatacgttttttgggaaaatgtttgatttggttctgcttggattgatcttactaagtgttattttgattatgatggaaaccgttcagggaatcaatcaaaaataccatactcagcttattatctgcgaatggattatcaccgtatttttcaccattgaatatgtacttcgaataatttcgattcaaaaaccaatccgatatatttttagtttttacggaattattgatttaatggcagttctgccaatgtatttatcaatatttttccccggagcaagtgtcctttccataataagagccttacgtttctttcgattgtttaaaatcctgcatattccacaaatctcccatcagtccattcaacttcgggaagccatcgaagccagtaaagagaaaatccttgtttttatctatttcgtattaatcagcaccatcataatcggttcgattatgtatctggtcgaaggtaaagaatccggctttacaagtattccaataagtatttattggaccattgttacgctaaccactgtaggctatggcgatatttctccacagactcctctcggtcagttcatagctgcctttgtcatgattttaggttacggaattatagctgttcctaccggaattgtaaccgctgaatttgcaaaaagcagtctaaaaaacagtgttgtaagcagcaaaaaaacatgcaaaaattgcaatgcacaggtacattttgatcatgcgcaatattgctttgaatgtggaacgaaattgcctaacagctaattcaacgaaaatttctccacctcatttttattaaaagttaaaccctgcaagtctaaggttttactaccattaagactaaaaaaatatgaaatatctaattaccatcgtcggaccaacagcaataggcaaaacagctttaagcattgctctggcacaacattttaattgtgagataatctcctgcgacagtcgtcagttttttaaagaaatgacaattggtaccgcggttcctactcccgaagaattacagtcagcgacacatcattttatacagaataaatctattttcgaaaattatactgttggtgactacgaaaaagaagcgcttttaaaattagaggagttattctcaacaaatgatttcgctatattgattggcggctcaggattgtatgttgatgccattttaaaaggattcgatgaatttccggaaattgatcctgagatacgttctgacataaacgcaaactacgaaaaactaggaatcaattatctgcaggagcaattacaaaaactggatcctgattattatcaaaaactcactgtagaaaacccgcaaacactccagaatccacaaagaatgatgcgttttaccgaggtttgtattgggactcagaaaccctactcttctttcttaaatcagaagaaaaacaatcgaaactttattccgattttaataggtttagaagccgacagagctgtaatttacaaccgtatcaatcagcgtgtagatctgatgatgaatggcggtttactggaagaagccaaagctttgcatcccaacaaaacgttaaatgcacttcaaacagtcgggtatcgcgaattatttagttattttgacggagaattctcgttgccatttgccatcgaagaaatcaagaaaaataccagacgtttctcaaaaagacaacttacctggttcaaacgaaacgaagctaccaaatggtttgattacgcgacagatagaaaagaaattatagattatattgaaaattcattcaagtaaaaatcattttctgtactctttactctattttctaaatcaatcaaaaatcaacaatctaaaatctaaaattcagcaatgccaatatctcctaattttacttccattctaagcaaagactgggaaatcaattttacgcaatgtacacccaatggttttctaaagtacactgacttatgcaacattctgcaattgacagctgctgcacattctgaaattggaggcatcagctttacggatatgcaggaatttgatcaggcctgggtattaagccgtatgcgggtggaaattactgctttgccaaaatggcgggatattgttacggtaacaacatggatcaacagtctagaaaattctcgttccgttcgtgctttagagatacacgcaaacggaaaaaaaatagtaggatgtgaaacgtactgggctgtttttaatacaaaattacgacgtccggaagctttagccctgccttacgaacattttgaattgtatccggaaaaacgcgctactacagaagggttttcaaaaataaatatcactcacgaaaaagaagctatttttgaaaaaacagtttacctctctgatctggacatcgtaaatcacgtcaataatgtcaagtatctggaatggtgtctcgatcacgttgacccaaaaagaatcctgaaacaggaagtaaaaagttttgaaatgaacttcatgaaagaactttcgcttcaggataatgtaatcattcacgagggcgaaaacgataatcaaactatttcaacattcagcattaccaaaggcgagaaaacatcttttgctttaaaattacactggaaataaaagaaaattaacgaaaagctgtttttcattgcccaaccattatctgctgtatttaaaatttgattccgtatcatgaaaataaaaaacgatgcagtattgcatcgttttttattcaatcaggttactttgattttttcttcttctttaacaaatccatcttaccttcaattcttttctctacttccttaatgttgcattcaaaagcaaattgcaacgtacatagtttggcttttttaatttcttttaatgctaatccaaactgttgctgtgcttcgtaaagaattgcttttttgacaaaaatttcagatttgtttattccttttactgttaaagcaaaatcaattaatttttctgcctcttcaaaatcttcattcaaaattaaagtttgtacataatgtggatatatctcaagcgcatgaatgtttattgctaaagcttcctgaaaataccatttggcttcttcgtaattccataattgttcggcctgaatccgcccatacaaacagaaaaccatcgtattcttagcatcatatgaaaatgcataatctaaagattcaatcgtttcttctaatgaataaggatagctgtccagcgcctgaaagagatatttatctattgttttcattttatgtgtcgctatttattgttttttttggtcacctctaattcgcatataatcattgctttttgcgaccaactttttaattatgctcatttcgtaaatctgtttttaacttctgacgcgttcctttataactcttctctgttttattctttttaaaatccgttccggtaaaaactctgacaggattcccccgctcaatgttcagttgattttcccattgtttcccaacatggtttttaagttgctgtaaagtttcgtcttccagtttttttaataatcgttctgttgccagttttttattctgatgctgtgaacggctgtccatcgcaacaaccgcaattccggttggcacatgagttgctctgattgctgaactcaccttatttacatgctgtccgccagccccggaactacgcatggcctgatactgaatgtcactttctaaaaatgatgtattctgttgtggttcaatctcaaaaatgccaataaaccaatttttacgtttgtgcattttcctaaactgactttgaccaatccattgaatagttccagtccaggaagctgcaaattgagtggcatttttaccttttactgcaattgttgccgtttcaattgttccattctcctggcccacttctcgctgaagcaaagtcgtttctaattgctcctcctgtgcttcttccagaacttttttaagtacctgagccactacccaggtacattctgccggtccccgacccgctgttatctgaattattttttccatttttctattatcttaagaagcttttctctgtttttagcttcctttacaaattttggaagtcttgaaaccatagtactattaccgcttccattattatttctttctcgtaattccgcttcaatatatctccctaaataatcaatgtgctgctggttataagcccaaaaaacagctgttcccacttctttttgaaaccaaagcggcaaattgtaataatactctttaactaagccgtcatccctttttgaattcttcaaaaccttttccacttttggtttccattcttcctgaaaattacaatgcggacatcttgttttatatactttcggtttgtcttttaagggttgtgatttaaattcatatctctcataacattgattacaatgtgctttgccataagcaatgtattgataaacggggctgtcaagtttcagaaagcaatctttacattcaaaaactttagtggagcaatgcccacacttacatccttctgaaagtttactctttaccttagctttagcatcacattttggacaccttactaaaatctcgtttataaaactttctaaaaacttattctcatcctgaaatcttttcataatctttgttttttatcggtccattctaacaatctttggtgtgaaagttcccagaacttcaaccaaatcactttgatttgacatcactttggtaatgtccttgtacgccataggtgcttcatcaatattccctccaatcaaggtaacctcattcgcttttaatacctttttaatttcactttgtgtaaaagtacttttacactttgctcttgaaaataaacgtcccgcaccgtgagacgcagagtttaaactctcagcattacctttacccttcacaatgtaaccgggagcagtcatcgatccgggaataatccccaattggccttctgcggcaggtgttgccccttttctatgtacaatacattcctgaccgtttaccatttctttccaggcaaaattgtggtgattttcaatcgtaaccactacccttttcccaatagctttggcaattcgtctgtgaatatcatcgtgacaggcctttgcatattcaccggctaaattcatagcaagccaatattcctgcccatcatgcgtattcaaatctaaccaggccaaatgctgcacattttttggtaacggacattgttttgtcgccaaataggtataatgcttcgcaatatttgctcctaatccccgagatccactatgcgataaaacggcgaaatactcccctttgtcaagcttccactcgttttcaggattctcaatttttgcaattccgaattcgacaaaatgatttcctccacctgaactacccaattgtttatacgccttcggtaaaagatttttcaataatggaatgtcttgaaattcacttttgtaaaaaacatcatgatctactcttgacgcatgagtttcatacattccaaatttggtattgtccctcaaaatagcttctaactgatgttctttacctttaaaatgagaagctggcaagtcaaaaatcgaaagactcattcggcatccgatatccactccgactccatacggaattacagcattatctgttgccaaaactccaccaatgggcaatccatagcccgaatgtgcgtccggcattaaagcacccgccactgaaattggcagttttaacgaatcatacaattgatatttcgcctgttcatcaatctcattttcaccaaaaattttaaagggagctcttgttgtttttaactgatgcattcttacctgaaccggctttattaaaccttcagccactttgccccaggtaccatttccttcgtacttttcgggattcagcaggacatcttttgcttcggttagaatagattcttttttctctctttttctatatctgttgatttgccctaaggcaatgtttattgaattgttttttggaaaccccaatttaatcaggtcttttccggataatttatttcccatgatttagatcatttcgtctacatattgctgatacaatgcctgtagacttttatttttaattggacttatctcttttggattctctttttcgtagtaactccatttatgaaaaatgccctttattaatctgtttattttatatctcagatgattgtttacaatataattgtctataaactgaatttgactttccaaatcagaatcaaccattttggcatgtgttatcatataaggactaacacgcagtacatatcgccagggctcattgaatacatagtgaattttgtatcgtttacaattgctgcaccagcgttctcttttataaaaatgtactttttctttttcggtcaattcgagttttgaacttttccattcccattctgaaaattcttttaccgtttggatattttcaacatatacatgctttctttttctctttttctttctcttaaaagatttttcaggagaaaactgccatgtatttattttttccaataattctctgtaaaatgaagcttcacttgatctggcgacatcatctcttaatttaaaattacgctgccatcctttctgataaggaacttctaaaggaaccaatggcaaatttctacgctttttccaaaggtcaacttcaagttttcttaactcaattaattgtttttcaaaatcttctttaattaatcgtcttttctttcttttacttttaaaacgagcacataaagcatactcgtctaccgtataattttccataaaaaaattatagtgcattaaatgttatagaattgttaactaaataaaataaacactacatttactaaaaatgaattattttcgattttatgaagaatttccatagaaaaacacaatattccgattgcaataatccaaatagagaggattacaaaacattactaatagaaaccctgatctaaaattatgaaattcgcaaatgcatctatttcgatttttatcctttttatactgccttttactattttttcccaagtaaaaaacatcggattacccgcaatcaaaaactataaacgatccgattataaaggaggcactcaaaattggaatattgatcaggataaaaatggcaatatttatttcgcaaacaataacggcttaatccagtttgacggatcaacctggaacaaatatccgcttcccaacaatactgccatcagaagcttaaaaatagacgaccagtctggcagaatatatgttggtgggaataatgaatttggttattttaagagtgatgcaaaaggcagattacaataccattccctttctgccttaatcagtaaaaaagatagcagaaacattaacctgatctggagaatacatctttataagggagaagtcgtatttcaatctttcaccaaggtgttcttttacaaaaacaacaaactgcgtcttatcaatgccccaagaagatttcaattctcttttctaataaggcaacatctttattttcaggataaagttctgggtattttagaatacaagaaccagaaactaactcctttaaaaggaaccactgctttaaacgacaaagagatctgggcgatgtttccgctacccaacaacaaattactttttgcaaccttagaaaaaggactttttacttatgactataatagcattacaacttgggaaaccgaagcaaatagtttcatcaaaaagaacacctctttgggcggagcaattatcggaaacaaattcatcgtactcaattcggttctcaatggtgccgtcatttgcgacctgaatggaaaaatccttcagcatctcaaccgacaaaaaggactccaaaacaatacggtactgacctcttttgttgacaataaaaacaatctatggctaggactggataacggaatcgcctttataaaccaaaactctccttttaccttttttgattatagttataatataggtactgtttatgcatctgtgattttcaacaaaaacctatatgttgccaccaatcagggtttattttatcattcctggaacgctccttttaaagatgaacccttcaaccgcgtcgagggtaccattgcacaagcctggaacattcaggtcatcaataatactcttttgtgtgcaagcaatagcggcgccttggtaattgaacaaaacagagtttcaaaaacactggacaatagaggttatttcggcttcaaaaccattccaaaccaccccggttacattattggcgagagctacaatggtttttctatctttaaaaactctgcaaacaaaatcacttacgttaatcaggtggcgggatttgacgagactacaaatacatttgaaatcgagcttgacaacaattatttgtggctgaaaaaagatccttatctgtatcagatgagattgtctgaggatttaaaacgatttgaccttgtaaaaaaacacgctcacatttcaacatcgaaaaaaggaataggaagtcttcaattgatcaacaacaaagtttactttcaaaccaaaaatcacttttacagatacagtgacgaacaggaagacttttttgaggacaaaaaagtaaccgctttattcgaaaaaattccgactgtaaacactataatagaagacaaatacaacaatttatggtattcctacaatgaatcacttggtgttttaattaaaggccccaatggaaaatacatccgcacagaagcaccattttctaatttaacaggtaatctggtaaacaaatatatttcggtcaatacaatcgatccgaagaacatttttatagggctaacggatggactcgcccattatgattctcaaatttcaaataaattcatcacaaaacctaaggtcttttttgaaagtttctcctctaccagcgatacgattatcacaggtaatcttgaaaaaccgttaacagaccttttaattccttatcagtccaatcacgtcaaatttacgttctcctctcctaccttcgaaaatcaggagaatgtaacgtactcctacaaactggaaccatttgaagaaaactggcgcaattggtcgggcacttccataaaagaatacaccaacctgagagaaggcaagtacaccatgaaaattaaagcaaaaaacagctacggcagggaatccggtgtgtctgaaatcatttttaccatctcacctccctggtacagacatttcctggcctatctgacctactttttattacttctggcagcaatctatattgtctcaaacagagttaaactcaaaatcagaaagaacaaatactatgaaacgatagagcaaagaagactgtatctcgaaaaggaatctaagatcagacacgagcaacacgaactggagaaagaaattgaacgcctaaaaagcgacaaacttcagataaaaatcctcgccaaagacaaagaactggtgagcaattcccttcaggttgtaaagaaaaacaaagtcttaaatggcatcattcacaaactaaaagaaatcgacaacgatgctctcgacgaatcgacaaaatttcaggtgagcaagctaaacaaaagcattgtaaaagaggtcaacacagacaaaagttggaaagatctggagaagcacatcaaaaatgtacattttgaattcttaaaacgcttaaaagaaaaatatcctacaatttctccacgcgaactggatttatccacttatttactgatgaatatgtctaccaaagaaatagccgaaattatgaatatttcgacaggtggagttgaattagcacgttatcgactccggaaaaaactaggtttaaacaaaaaagaaaacctgattggatttctgatgagtatctaaaaacaaaaaggcattctgtagagaatgcctttttattagtttataaattctaatgttcgttccaaagccatgcctctggatccttttatcagaattgtattttctttaaaatgtatcgtcttcaaaaactcagcaaaaacatcaaaagtttcaaaaaactgaagtttgtcgctgaccacttttgtttcgtaaaagtacttcccaatcaaataacaaacggattgattttgatcggatagtgaatctacaatttgtttatgttcctgttggctttcgtcgccaagttcaaacatatcacctaagatcatgaccttgttcgaattttccaattgcaggaaattagtaatagccacagccatactgctcgggtttgcattgtaggcatccagaataatctcattcaatcccttctttaataactgagatctgttgttctccggtatgtaattttcgatagcctgtttcaccgccttttcttctaccttaaaataagctcccattgctacggccgcattgatattatttgcgttataaagtcctattaaatgcgattctacgctaaaattatcgtacccgatcaccacaaatggattggcctgaatactattgattttcaggtttgcctgagcattattcactccaaaagtaaaagattcaattccggctgatttttcaatctggattggatcttcgaggtttacaaaagcaatcttgtggtttttcgccagatattggtacatctcgcttttaccaataattactccttcaacaccgccaaaaccttctaaatgtgcttttccgaaattggtaatatagccaaaatcaggctgtgcaatctcacacaagaacgctatttctttcttgtgatttgctcccatttcaacaattccgatttctgtctcttttgtaaaagacaacaaagtcagcggaaccccaatatgattgtttaagttcccaacagttgctttggttttaaacttctgagataaaactacattgatcaattccttggtagttgtttttccgttacttcctgttaaagcaataatgggaagtttcaaatatgctctgtgatactttgccagttcctgcaatgtttctaagctgtcttctaccaaaattgtcctgtcgtcaatagcataagcggcattgtcaataacaacaaacaaggctcccaattctagcgcctgcgaagcaaaagtattggcatcaaagttttctccttttatagcaaaaaacatagaatccttttcaatttttctcgtatcaattgaaactgatttacattttaaaaacaaattatgaaggtccttaatattcatttataaaaaattttacatattaaaaataagcaataaaaaaattccaaattccaaaagctgcgtaaatcagttggaatttggaatttttttattgaattttcttgattttagtttctaggtgattttcttttctcagatttagcacctactctggacattgcacatctaaatccgatgtaatcagttgccatatcctgagggaaatatcttctttgacccggatccagccaataagctctgtctctccatgaacctcctttgtaaactcttacattatcatcgattaatgttgtacgtttacttgagttgtcatatttcttaaccatctgacctaaactatctgttgtgatattgtgtttaggtgagttgtacatcgcctgatctgcttttgatcctgattcagaatctccgaaatcaaaatatttagaagattgcttgtctccgtctctgtagttaatgttgttacttgtatcgaagttagttcttaagtaagtttcattttcatcaacaggaacctgagcaatttctccaggtaaatttgttgctacttttttaccattacttaatgttttgtattgaatattatctttagtaataatttcaattttaccatctttcccgattttgtttttagcatactgatttcctctaaagtagttgaaatcatttgcttcgttatcgataataggtctgtaaacgtcagcaacccattcggcaacgtttcctgccatatcatacaatccaaaatcgttaggagcgtaactttttacagagtttgtaatatctgcaccatcatcagaccaacctgcaattccaccgtaatcaccgtttccttgtttgaagttagccaattgatctcctttgtttttacgttttgcagaacgtgtataatctccagaccaaggatatttcttttgtcctttatagatattgtattctctttgtccaacatcagcagcagcagcatattcccactccgcttcggtaggaagtctgtattccggcaaaataagtcctgaagaacgttgtgcatatacatttttctcttcctgaacaacaccgtctttacctgctttaggtttttttcttccgctagggtttttctttaacacaagctcttcgttacctccgtaagttgtacttggagaagcaacataaccttctgtattaaataaactttcagcgctaacatcctgagtttttgctcctcttttaaggtaaccgtttttctctaaaactgcttcgttcacacgatcagttctccatttagcaaattcaacagcctgaatccaatttacacctactaccgggtagtttgcgtaagatggatgtcttaagtagttgtttgtcatcgtttcgttgtatcctaaacgatttctccatactaaagtatcaggagatgctccttcgtaaatattcttgtaattttcttctgttggtgggaaaactttctttaaccattccaggtactctaagtacataccgtttgtaacttccgtttcatccatatagaatgactgaacgtgttgttgagttggtgtgttattccaatcgtgcataacatcatcttgtactttacccatcgtaaatgtacctccctcaacaaaaactaaaccaggacctgcctgttgtttttttcctgcatttctggcagcagttccattttgactgtctacgtcccaaccagttgccctggaagcatgactggaactcgattttttgctacaactagccgtgcctaacatcaataccattgacatcattaattgcaagactacaattttgtttactttcatactcattcttaggtgataaatttaggtgctgcaatataataattaacatttaattggcaacatctgttctaataattttatttcgctgttttttaccagaaaataacctattgttacgaacgcaaaaatatactttttattatttactataacatgaaatactatatttttacctactaaaatatttttaattaaaaaccgttttatccgctaatgaaacaagtcctgatcttatatctttttctccttccatttatctcattttctcagataaatggcgactttacgttagattggcaaaacaaaaaagagatgagttttggcgactcaaaattaaaaataccgtatttttccggaaacagttttcggtatgatactactaaaaaaagcataatattactgctcaatctgaccgaatccggttattcaaactacaattcgattcaaattttcaatgtcgtttacgaatccgtttcaactgccgacctgggcgacctttcgctcgagaatatccctgaaaaaccaaatgagtctcttaaaacaactacctcaagagacctaaagcaggtattcttatcattatcgcctattataaaagaaggaaacagcttcaaacgaatccgatctttttcttacaaaaaaacctccgatagcactgcaaaaaacaatacttcttcttcttttcaaaaagcaaatacagtttacaattctgtattagctacgggagactggtatcgtttttacattgaaaaatcgggcatctacaaaatctcgagatcttttcttcaaagcctgggatttgaccccggaaaaacagatccaagaagaattaaaatttatggaaatggaggaaaaatgcttcctcttgccaacaacgcttattatccggaagatctggcagaaaatgcgattcagatcgttggtgaaacagacggtgtattcaacaacgaagattatattcttttttatggtgaaggcgttgaaaactggaacacagaaagccagactaacctgaacttgtacgacaccaaatcctattattatattaccactacaggcagtgatggaaaacgaatcgctcctctaaatcaacccaccggcaacagcactttagagctcaatactttcgacgattatcaatttcatgagatcgacaaaataaacatcgctcatttgggacgccagtggtgcggagaatcttttgacattactcaggagcaggaattcagctttaactttcccaacatcgacacttcagtccctgtaaaaatagaactcaaagcagcctctgcagcctacactcctacttcgtttaccatttcggccaacggacaaaacatcggaagccttaattttcaagccttggcactaaatgctgatatcaaatattacaatcaggaattaccctccaacgcagcctttaccggagccgaaaatgtaaaaataaaactcacctacaacaacaatggtgttcccggatcaaaaggctatcttgatttcataaatctgactgccaaaagaaaacttctaggcatcggtaaacaattcagatttcaatacaatttagcaggttcaactcccggaatagccaattacaccatcggaaatgccgccgccatttctcaaatttgggacgttactgatcctactaacaccttaaaagtagaaaacaacaaccaagccaacttaagctttaaggcatcgttaggtgaaatcagaacatacatcgcccttgaccctgccgattattacgctcctttaaaagaaagtcaatctaaagttgcgaaccaaaatttaaaaggaacacttttcaggaatgcgcaaaacagttttcaagacatcgactatataatcgtgacgccaaaaatccttgtttctcaagctgaaaaactagctactttccaccggataaattctaatttgaatgtaaaagtaattctactggagaacatctaccaggaattctcttccggaaaacaagacgtggcagccattagaaactgcattcgatacttatacagcaacgcttctgcttccgaaaaaagacttaaatacgtaaatctgttcggagacgcctcatttgactacaaagaccgaattacaaacaataccaacattgtaccggtatatcagtccgtggtcagcaactctaccggagaagcctcatttgcctcagatgatttttacgggcttatggatgccaatgaaggggttgtcgttttcccttttggaggaattgatatcgctgtaggcagaatgttaatttcagacaatactcaggcagcagaaatggtcaacaaagttttagaataccacgaccagaaatcatttggaaactggcgcaacaatgttgttatggtaagtgacgactctgaccgaacctcagacacaaccttacaatcacgccagaacaccctggccgatgcaatctcaacccaaaaaccatttttaaacgtagaaaagattttccttgatgcctacgcccaggaagcttccgcaggaggatcgaggtacccgaaggcaagaaccgatatatttaatgcttttgaaaaaggtgctttagtctttaattaccttggacatggcggcgaagacggtctcgcagccgaaagaatctgggaaaaatcagacggtcaaaacctgaacaatcaatacaaataccccttattcattacaataacctgcgagttttcgagatttgacgacccaacaagaccaaccgcaggagaatatactttttggaatccaaaaggaggcgccatctccatgttaaccaccattcgcgccataggacaatacaatgcagaaaattttaatgacagcctgaacaaaaacctgttctcatacggatccaaccaatacacaagcatcgccgaagcacttcgaatttctaaaaatgaaaacccaagctcatccagtaatgttattttttacattggcgatcctgctttgatgcttgccattccgaaaccaaaaatcagtttaacaaaaatcaatgacattgcgatttctcagcctattcccgactttaaatccttgtcaaaaattaaaatcacaggagaaatcacagacgaaaacaacacgctgttaagcaattacaatggcgaactggcaactgccatcttcgacaaattaatcaccaccagcaccctaaataatgatggatatagccctgcaatgtcattcaaaatactgggagaaactatcttcagaggaaatgcttcggtaaccaacggtcagtttgaattcagctttgttgtaccccgagacatccgtgttcctgttgattacggtcgaatcagtttttacgcaaagaaaaaccaaacacttgaaaatcaatcaggttacaacaccactataaaaattggaggaataaatgaaaatgctccacaggacaatataagtccaaaagtgaagttatatatgaacgatgaaacttttgtatcgggaggaattacaaacgaatcgccctttttactggcgtttcttgaagatgaaaacggaatcaatacagcaagcggaatcgggcatgacattacagcagtgctggacggcgatgtaagcaatccttttgttctaaatgattattatcagacaaaacttgacgattacaccaatggaaatttacgttttccattgcgaaatcttgctgccggaatgcacacgataacatttacagcatgggacgtttacaacaatcccgtaacgagtgaaatacaatttatagttgttggaaatgaatcgctgaccttaacacacgttcttaattatcctaacccattttcaacctatacgcaattttggttttcacacaacaggccttacgaacctctggatgtgcaagttcaggtaatgactataaccggaaaagtcgtttggacaaaaaaccaaatcgtcaccacagaaggttttttatcgagagaaatcacctgggatggaaaagatgattttggcgatcgaatcgggaaaggcgtatacatttacaaactcactgtcaaatctaatttaacaaataaaaaagcagaaaaatacgaaaagcttgtcattttataatattctatatatttgtatcaccaacaccatacctaacataaatgaaaaaaatatcgcttctattaatttgccttttaattattccgtacgcaaaagctcaaaacattgaacgccctattactacaggagtaccttttttattagtcgcagctgacgcaagagctgcaggtttagccgatcagggtgtcgctacatcagccgacgcttattcgcaacaatggaaccctgcgaaatatgctttctccgtagacaagcaaggattttctatcagctacaccccttatttgacagacttagccaatgatatttcattaggtcaggcaacctattacaacaaaattaacgaccgaagtgcctttgcaggaagctttcgttattttggctttggggatattgaactaagaacaaccggagacccaaatgaagccgcaagaatcgtttctccaaatgagtttgccttagacggttcttactctttaaaattaagcgagaaattctcaatggcggtagccgcaagatacattcgttctaatctgaaaattgcttctgaagaagttgacgcgtcagcttcaagcacttttgcgatagacgttgccggattctaccaatcagaagaaatcgcttatgctgattttaacggaagatggagaggtggtttcaacctgcaaaaccttggacaaaaaataagctacgataacgacgatatcagttctaattttttaccggcaaaccttagattaggaggaggttttgatttcatcttagacgactataacaaagtaggtcttagtgttgaatttaccaaacttttagttccaacgcctccgggagcaggaactcctgtagatgcaaacggtgatggtgattttacagatccgggagacatttctcaggcacaagctgatgcagcaaaatacaaaacctacaaagacattggctgggtatccggaatttttaaatctttcggagatgctccgggtggtttcagtgaagaattaaaagaaatcacttatagtgtaggtgcagaatatatgtatcaggatgcctttgctgtaagagcaggatattttcatgaaagtcctgtaaaaggagccagacaattcttctctttaggagcaggattcaaatacaatgtagtaaaagttgacgtttcgtatttattttcaacatcaaaagttaaaaatccgttagaaaatacacttcgtttttctttaacctttaactttggcgacaaatacgaagtttattaaaaccagaaaataaaaaattaataacaatccaaattcctgtttctttaggaatttggattttttttcccttaaacagaaatgaaagaaataagcattacatcatccttcaacatttacaataaccttgaagaactcccaaaagacattcaggagttaatgagtcaggcggtcgaagttcgcaaaaaagcatatgcgccctactctcaatttcgggttggagctgctttacttttagacaatggaaaaatagtgataggatctaatcaggaaaatgcagcatatccttcgggattatgcgccgaacgtgttgccatttatcatgccggaagtgtatatccggaagctaaaattctaaaaatagccattacagcagcttcagacactaatcagaccacagcaccgattccgccttgtggatcttgtcgtcaatctattgcagaatacgagatcagacaggacacccctattgaaatcttttttatgggagaaatcggagaagtttacaaatcggcatccctaaaaaatttactcccgtttatgtttgataaaaagttcttgtaaaaaaaagccaaaaagtagcttttaaattttacttcttactaggaatgtcttatttttgcatcccgacctttcgggcgcaaatttgtgggaggaaactattttgcgttacaggcaacaattgataacacaaacaaactttagcaaaagaaagaattcagatgaaagaagttacaaaagaggtatatttaaagtggtacgaagacatgctactttggaggaagtttgaagataaacttgcagcattatacattcaacaaaaagttagaggttttctacacctatataatggtcaggaagctgtattagcaggagctttacacgctatggacctgaccaaagacaaaatgattactgcttacagaaaccacgtacagccaatcggtatgggagttgatccgagacgtgtaatggctgaacttttaggaaaagcaaccggtacctctaaaggtatgggaggatctatgcacattttctctaaagaacaccgtttttacggaggacacggaatcgtaggtggacaaattccggtaggagctggtttagcttttgcagataaatattttgaaacaggaggagttactatgacctattttggtgatggagctgcgagacaaggttctttacacgaagctttcaacatggcaatgttatggaaattaccggttgtatttatcgttgaaaacaacggttatgcgatgggaacttctgtggaaagaactgcaaaccacaccgacatctggaaacttggtttaggatatgaaatgccttgcggacctgttgacggaatgaacccggtaaaagttgccgaagcaatgacagaagcaatcgacagagcacgtcgtggtgacggaccaactttccttgaaatgaaaacgtaccgttacagaggacactctatgtctgacgcacaattgtaccgttctaaagaagaggtagaagaatacaaaaaaattgaccctattactcaggttttagacgtaattatggatcaaaaatacgctacagaagaagaaattgaagtaatcgaccaaagagtaaaagacctggttgaagaatgtgtgaaattcgctgaagaatctccatatcctgaattacaacaattgtatgatgtagtatacgcacaagaagactatccattcacacctcataaactataaatcaatggcaacaattattacaatgcctcgtttgagcgatactatgacagaaggaacggtagcgacttggcttaaaaaagtaggcgacaaaattagcgaaggagatatcttagctgagattgaaacagacaaagcaacaatggaatttgagtctttcaacgaaggaactcttttacatatcggaataccagcgggagaaactgctcctgttgactctttattagcaatcattggaaacgaaggagaagatatttctgctcttttagccggtggtgctgcccctgctgcagaagcaccaaaagcggaagctgcccctgctgcagaaacaaaaacagaaactgctgctcctgcaaaagcagcaactgaattaccaaaaggtgttgtagtagttactatgccacgcttgagcgacacgatgactgaaggaacagtagctacctggttgaaaaaagtaggtgacgctgttgctgaaggagatatcttagcagaaattgaaacagacaaagctactatggagtttgagtctttcaatgctggtactttattatatatcggaattcaggaaggaaatacagctcctgttgacagcttgttagctatcatcggacctgccggaactgatgtttcgggaatttctgcaaactatactgccggaggtgctgtaagcgctcctgcaactgaagaaactaaaactgctcctgctgctgaaaaagcaacagaaacggtagccgaaacttcaaacggaggaagaattctagcttcgccattagcgaagaaaatcgcttctgacaaaggaatttcattaaatcaggttaaaggttcaggagaaaacggacgtatcgtgaaaagcgatatcgagaactttactcctgccgcacaaacacctgctgcggctgccgcaactacaacttctgctgctaaaccacaagaagtcgcacctgctgcaccaaaagtatttgttcctgccggagaagttttcacagaagagatcaaaaactctcaaatgcgtaaaattatcgcaaaacgtttggcagaatctttatttacagcacctcactacaacttagtgatcgaagtaagcatggacgaagctatgggagcaagagcaacaatcaatacggttccggatacaaaagtatcttttaacgatatggtaattaaagcttgtgctttagccttgaaaaaacacccaaaaatcaactctcagtggaaagaagatgcaatcatcatcaaccaccatgtaaacattggtgttgccgtagcagttgaagacggattagtagttcctgtattgaaatttacagacgctatgagtttatcacaaattggcgcaagcgtaagagatcttgccggaagagcgaaaaacaaaaaactgggaccacaggaaatggaaggaagcacctttaccgtttctaaccttggaatgtttggtatcactgaattcaattcaatcatcaaccagccaaactctgcaatcctttctgtaggagcaattgtagaaaaaccggtagtaaaaaatggtcagattgtagttggaaacaccatgatgctttcattagcatgtgaccacagaacaatcgacggtgcaaccggagctcagtttttacaaacattaaaacaatacatcgaaagcccggtgaccatgttagcataatttttatgcccatgtccgtctgagcaaagtcaaaatgactaagcgaagtcgaacgtcagtctgagcgaagccgaacgtcagtctgagcgaagtcaaaatgactaagcgaagtcgaacgtcagtctgagcgaagtcgaatgtcagtctgagcgaagtcgaagacccccctcataataaaatcccgtcctgaagtttttcgggacgggattttttgtttaattttcatcctcaaatccaaaacacataaaaatgaagaaaataactcttgtagctttattcttagcagctcttgcctgccagaaaaaagaacaaaccgaaaaaaatacagccgtcattgacgaacacagctattctaagcctgaactcgctgtcgttaaacaccttgatctcgatatcaaagtagattttgacacacaaaccattaccggaaaagcatcgtggcaaattgacaatgttagcaaaggaaacgaaatcatcttcgacgaaaacacgcttaacattaccaaagtaaccttaggagacgaagaaaaagaaacgaaattcaaacttggcaccgacgtagaatttcacggaaaaccacttcacattactatcgaacccaacactactaaagttaacatttactacagcactactaaagacgcagtggcactacaatggctaactccggaacaaacggcagacaaaaagaaaccattcttattctctcagggcgaaagtgtttggtcccgtacctggattccatgtcaggactcaccgggcatccgttttacgtacaatgcaaaagttacggttcctaaagatttaatagccttaatgagcgctgttaatccgcaaaagaaaaacgacaccggagtttacaccttcaaacaagacaaagcaattccttcttatctaatggctatcgctgttggagatcttgaatttcaatctatcgacaaaagaaccggagtttacgcagaaccttctttactgaaaaaagcagcatgggaatttgccgaattaggcaacatggtaggcgctgccgaaaaactatacggaccctaccgttggggacgttacgacgtactggttttaccaccaagctttccttatggcggaatggaaaatccaaacctaactttccttactcctggcgttattgcaggagatcgctctctaacaagccttttagcacatgagctaggacacagctggagcggaaatttagtaactaatgccacctgggatgatatttggttaaacgaaggatttacgacttatgtagaacacagaattggagaagccatctttggaaagaaagaatttgaaatgcaaaacgttatcacaaacaaagaattagtcgataatgtagctgaatatggaaaagaaaatccggacacgagattaaaagttagccttaccggaagaaatccggacgatggaattagccaaataccgtatgtaaaaggatatgcatttttaagagttattgagaatgctgttggccgtgaaaaattcgatccgtttattaaaaattatttcgattcacatgctttccaatcgatcacaacagaagacttcgtaaaatatattaacgaaaaccttattaaaggcgacaaagctctggcagataaaataaaactggacgaatggatttacaaaccgggaattccgtcaaacatccttccggtaagttctcctgattttgatgcgattgataaaatccaaaaaacatggagagaaacaggcgtaacaggtctaagtaaaaaaattacaacaactgccgaaaaacagcattttatcgatcatcttccaactgacattacagcaaaagagatggaagctattgacaaagaatttaactttacaaaaggcggtaacttcatcatcaaacgtcagtggtttgcgcaagccattgaacaccaatacaaagcagccaatcctgctattgagcaatttctaattggaataagccgaaccggatcggtaatgatgttgtacaaagaaatggttaaaactcctgaaggaaaagcatgggctaaacagattttcgaaaaagcaaaatcaggttaccatgctacaactattcaggctgttgaaggcattttgaaatagtattcagtattcagtttgcagtcgcagctctcagtcgcagctctcagtctcagctctcagtctcagtctcagtctcagtctcagtctcagtctcagtttacagtaactgggactgaaaactgccaactgaatacttacttattcctcgcttcaatccactttgacatgtacatggtgcttttataagcatgatgctgcaataaactccccataaaattatgcaaacgatggcttttagcatccattaacaatgaatttaccacagacatgaatccatctgagtatttatctttcaaataacactcgttgataattgcaattcccttcttttgagcctcgttccaaagattctcatcctgataaagtcgaattgctttcttagcaaattcagcctcatcatcttctataaaaccattccagggtaaattagcatgcatcgcttcagaaccaattgcagtggtcacacttggcgttccgcattgcatagcttctaacaatttcccttttaaacctgctccaaaacgaattggcgccagtacaactcttgcatttttcacgatttcgacagcatctactgcccttcccatgatataaaatccattcttaggctgatggatctgcagtactttctgtgacggataagcgccgtaaatttccaaaacagctgtagggaaatcttttttgatcaaaggccaaattacttctcttaagtactgaaccgtattccaattgggctcatgaaagaaattcccaataaaaacaaacgtgttcctttcttcaaatgatggtaatttcaaaagatcatcttcagacatagaatctgtcaaaaaaggaagatacaaaagtaaatcggcattgattctgaacttgtcttttagaacatccatttcaaacgtcgaaataatcaaagacaaatcacatcttaaaatactggcaatttctcgttttgctacttcttcagaaaaaagatctgtcacttcaaactttcgattttctttaaaagccttttgcctggcagcacgtaaacaatgcaaatcttcagtatcgagaatccgaatcgcatcaggacagttttccgtcactcgccatccaaattgttcttcgatcataaaacgatcaaaaagaacaacttgcgggtttagttcctttacaaaatcatcaaaactggccgaattgagctcaatgctttttttcgctactccgaactcagacaaatccaccataaaatcgctgtctaatgccgcactgacaaatgtgatgtcaaattcattctgtttaaaaatagaaattaactgcatcattcttcctccggcagcagacgaatttggctcgggccagacagaaccgataattaaaagttttttcattggattcatttacattgcattcaagctacaaaataatgcttttttgagcgtattcacatggaatttcctgttttttggtcataaaaatgagtaattttgcagcatacaaatttcggaatcaattatgttaggattaaaattagccacagacccgcgctgggtaaatatagtagaatcaaatatcgaagagattttgacggatcatgcgtggtgcgagcaaaaagcagcttcaaatgccatcagcttagtgacttacaattctgaactggaagaattggttaccgaaatgcttgtaatcgccagagaagagctcgagcacctacaaatggtgcacgatattatcaaaaaaagaggtttgaccttagggcgtgaacgaaaagatcactatgtaaatgaactttttaaatttatgaaaaaagacggaagccgcagagatgctctttgcgaccgtctgttgttttcggctatgattgaagccagaagctgtgagcgctttaaagtactttctgaaaacataaaagacgaagaactggctaaattctatcgcgatttaatgatttctgaagccggacattatactacatttttaggttttgcacgaaaatacacagacaatatagatattgataaacgctggaaagaatggattgaatttgaaggttcaattattaccaactacggaaaaagcgaaaccgtacatggataatattcttttaactcgattttcattttttacctataaataccacaacttgttatgtctacaaataaaataaagaccattttactaaaaacggccaaataccttgggattacctttgttgtcattataggactactattccttactcccattatttttgaagatcaaatcaaggaacaaattaaaaaaaccgctaacgaaaagctaagtgcagaattgaattactctgatgtttcggtttcgttttttcaacatttcccttcgcttactttaaccttaagcgatttacacctaaacggatcggctccttatacaaaagaaaaattcatcactgcgaaagaagtttcgtttggtatcaatgtagccagtctggttttcagcaaagaagtaaaaatcgatcagatttatctatcagattcctttatcaatgtaaaagtaaacgaagaaggagaagccaattacaatatctacaaatcaaattctcaggccgaagcccctaaagacagtaccgaaaccgctttaaaactggaacgaattgaaattttaaacagtaaaattgtttacgatgacaaatcaaccaaaatccattttgatgcgttcgggtttgattatttaggaaaaggagatttaaacaaagccgtttttgatttgtattcgaaagcaaaaattgaaaaattgaatattgtttatgaaaatgaaccttatttaatgaataaaaaagtgaacgctgatttgattacaaaagtcaacgtcaactccctgtccttttatttccaacagaataaccttaaaataaatgatcttgtggtcgactttatagggaaattcgacttcctgaaagacggttataatatggattttgtgatcaaatcagacaacagtgatttacacgatgtttttaccgccttccctccaaaatacattacctggctgtcgaaaacagaattaaaaggaaataccaacctgcttttaactttaaaaggagactatattgccgcacagaacattgcaccggatcttaatctggatgtaaaaatagacagcggatttgtcaattataacaaaagcgcttttccggtttccaatttaaatttagagatcaaaacaaaagttccgtctttaaatccggacctgctaattgttgatgctaaaaatctttcgttgaacatgaacaaagattatttaaaatcgaaattttatgtaaaaggcataaaaaccccggatattaacgccgattttaaagccaaaattgatcttggaaaattaatgcaggcacttggaattccgaatatcgttttaaaaggaaatctggcaggagacgtaaaagctaatgggaaatttgacttaaaaaacaaacttcttcccgttaccaacggaactattgacttggtaaacggttacctaaaaacaccttattacccaaatccgatcacagacatcaccatcaaatctaagattgagaaccctaaaggaacttttggcgatttaaaaataaacctaaaacccgctcagtttacttttgaaggaaaacctgttttcgtagaagccgatttgagtaattttaatgatttggcttacgacatcaaagccaaaggagaactggacgtgaacaaaatctacaaagttttctctcagcaaggacttgatttggacggttccgtaaaagccgatttggttttaaaaggaaagcaaagtgatgccgaaaaagggaattaccgcaagctgtacaacaaaggaacacttgaacttagaaatattggaataacttctgaatatcttccgaagaaattcatcatcaaagaaggcattttcaaaatcaatcaggataaaatgtccttcaataactttttggctgcctacggtcaatctgatttcaggctaaatggttacctgcagaacgttttcaattatgctactaccaatactggtgttttaaaaggctcttttaaatcgacttcacgctatatcaatgtggacgaatttatgtcggctaccccgacaaatacttcggttacagaaaccaaaacggaagcccagcctcaaaagcaacctgtacaaaccggtgtaattataattcctgccaatttgaatctgcagtttacggccaacgctcaaaaagtaaattttgacaaattgaatcttttaaatgctgttggaaatctaagcatgaacaagggtaaactgaacatgcagaataccggtttcaatctaattggctgtgatgttagcatgaatgccaattatcaggcaataactcctaaaaaggccaattttgattacgcgattaaagcctctgattttgatatcaaaaaggcctacaacgaaattgaagtctttagaaaaatggccagtgccgcagaaaaagcacaaggaattgtttctttagattaccaattaaaaggccgcttagacagcaatatgtctccggtttatccatcgcttgcaggcggaggaacgctttcgataaaagatgtaaaagttcgcggactgaaaatgtttagtgcagttagcaaacaaaccaatacagagtcgatcaaaaatccggatctttcgaaggtggacattaaaaccaccatcaaaaacaacattatgacggtagaacgttttaagtttaagtttgcaggcttccgaccaagaatcgaaggtaccacaagtctggacggaaaactaaacctgaaaatgcgtctgggtcttcctccgttaggaatttttggaatcccattaaccattaccggaactcaggataatccaaaaataaaagtgggaagaaaatcccaaaatctagaagaaacaaaagatactgaagaataaaatcagaaaacctgttcataatgagcaggtttttttattcaagagcctctttaaattttatttgttggttttcttatgatgattttcagctaaaacttcgttaaatttttcatacaatagcgctgctattctataaaaatttgccttgtttcgctcgaaaatcctttaataattaaacctcaaaaataaattctaaacagactctaaatcaaattatatttatagttttgaatagcaatgcagtgtactcatgaaacaatctaaaaaaggagagttttacggccagaccaacaaaacgatttctcttgaaggaataacgttgactgataccgtatatacacaccctacagtagactggcactatcatgagcatgcttacttcacttttatcctgcagggcaatgtaattgaagggaacaaaaaagaggtttacaattgcgctcccggaagtctcttgtttcataactggcaagaaccacactacaacatcaaaccggaaggctttaccagaggttttcatcttgaaattgaaaaaaaatggtttgacgacctcaccttaaacagcaacaacctgcaaggaagtacaactgtcctaaaccccgacatcaaacttttgatgtataaaattttcagagcgaccaaaattgacgattttcattttgacctttctacacaaaccctgttaattgaaatcttatccaaactaaatggcgactttgaagccataaaacataaaaatcctaaatgggttacaatgattgatgaaatccttcacgatcagcttaccgaaaccattacgcttgattatttatctaaaacattaggcatccaccctattcacctgtcaagagatttttcaaagtattttcattgcaatctcggagagtacatgcgaaaattaaaagtagaaaaagcactttcactcattgctcttcaaagcaaatccttaaccgaaattgcgtacgaatgcggtttctctgatcagagccacctgacccgatcctttagagaaataaacggactgaatccttccgaacacaaaaaaatactgttccaaaaataaaccagatgttaatcctgtacaatttttagaatttattgcagactaactttgcctttcaatctaataatcaatcaaatgacaaaacactttcttttactcgccttactattttgcaatggcatcatttcggcacaaaacaataatctgttcaaacccgatgcgattacaaccgaactgcataaaaacaacattggtaaagttacttttatgaaaggcaacattcctttggaccagtataaagaatctgatattctgaaatcttttgagctaacctacaaatctgatttgaatatcagagttttcatgaacaactctgtcatcaattacttgcaccaattgaatcctgaattatctgcagatcaacttttaacaaccggaaaccttcagtttgcctttttcatcgacaataaactgctctacactgaaaaccttaactacggatgcagctttggatcagcaggcagcaaaaacacttcaacaacctttagagtccctttaaccagtacaaaaaaagaagactggtggtctatttatctatgggaaagattcaaacttaacggcggagaaaaagccctaaccaacggcaagcacaaactaaaaatcgaaattcgcccttatcttaaatccgataaaaacaatgagattaaaacaggagatttaattgcaaaaggagaagttcagctcatcttaaaagctccgaaactaactgccaaacaaatcgaagttcagcctatccaacctaacagcggctgggaagtttcgaattttgcttttgataagaagaaaattgaaaaacttaatgctgctattgccagctacaatttgaaggaaattacaagtatcgttgtagtctacgataaaaaactactgcttgaagaatattttaatgatactaaccgaaacactttgcacgatacccgatcggcaggaaaatcttttgcatcaaccttagccggaattgccataaacgacggctatcttaaaaatgaaaatcaaacactgaaccagttctacgatttaaagaactatgccaattatgagtctaaaaaagacagcgtaaaaataaaggacttactctccatgagctccgcttttgaaggatctgaccaaaatagcgattctcccgggaacgaagaaaacatgtaccctacagacaattgggtgaaattcactttagacttacctatggacaaatccaaaaccaatggcggtcaatgggattattttacagccggtgtggttttattgggcgatatcatccataaatctgttcctggaggattagaaaaatatgccgatgaaaagctttttaagcctttaaacattactcattaccaatggcaatatactcctcaaaaagtagcgaataccgcaggaagccttcaaatgacagcactggattatgccaaatatgcgcaattataccaaaataatggcctttggaatggtaaacaaattctaacgactgattgggttcaaaaaaccctaacccaccagtttcagattcccgaaagagaaaaccaatactacggttatctgttttggaacaaaacttttacttttaaaaatactccttacgaaacctattactgcgccggaaatggcggaaatgagtttatgattttcaaaaatattccgcttgtagtaatcattacttcaaaagcctacaacaaaccttatgggcacgcacaagctgataccattgtacaggattatatacttccatcaatattaaaataaaagtcaggatcaggctcaaaaaggcattcactttactgtaaagcgcgttagagatggcgattgctgttcttttgcgatctctaatggctttgcattttctaaaattacctgtcattaaagatttaacgtacaggattttttgagaattatattagtcctttactaaacagacaatgtttcggaaacatataaaataccttttgccaacaaccacaacaaggccgccatgcctaaaagtccccaagtccagttgctgcttcttttccaactgaagaaaaatgtcgggatttcccaatatttaatcacgataaaagtgcttactccaattaatgaaacccaaatcatctcggcagaatgaatgtaaaaactataaaataaaaccgaggcaaaaaagagcgttgtcacaaattgtaaataatagtaattcttataattgcgtttgtaattatccttaagcgacaacagcaaaaacgatacaattagcaaactcgtcaaagcggttattacatatgaaaaaattgcattatactgccaaataaggaacccgtctatgattagcgccaaaaccacacaagctgcgagcgagtaaacacttctttcaatataagcatctttctctttatagggtatcagaattgggtacatatatttctctaaaattcgccaaaaaggcaaagcacaaatagccgccattacagcaatcacaatttcataattatacaccgtgtccgccggaactttatacaaaagataaaacagcgccacagtaacgataatagcaggcaggcaaattgtttttacagtttcccacttatcatctccccagaaattattctttatttcaaaaatatatttctgtaccaaatatttacgggtaaaaattgctgtggactgactccatagcaaaaacaaacctgtatgaattactatcgaccgcaatgtcatttcttctataaaacacccccaaacaacgcaagcagcccctactaacaacaattcgtacgttaataaaattgccgaaaataaaagtctgaataagggagcaaactgattgatcaggataccgatcagtgaattccaataattgcgcaacaaacctattatcgaacatattgcaaaaaatgccgagagatacaacatccaattggtcagcgattgtgtttgcatccataattgaactgcagaattttttacgggagtatagactatatgagagttggcgtaaatttcgttcgctaattgatttcttatcgtatcctttagtccagaaaattgttttttgtgcttttgccaataaacagtagcatcagaaccgcttttttgcaaaacagcaaactcgtataaaatctttttttgagcatcggtcaatgatgcaacttgctcgggagagtgaatttcttttgcaaacaggcttgtacagaaaagaaacaggaggaaaactatttttttcaaaatttggatagattaatccttccaaaaatacaaataattaagtattcgatataaagcaaaaaacccgttcaccaaagatgaacgggttttgtaataagtaatctaatgattatgcttcgaatggaaggatagatacataagatttgttatcttttttcttttggaacttaacaactcctgctactcttgcgtgtagtgtgtgatctttactgatgtaaacattttcacctggattgtgttttgaacctctttgtctaacgatgatgttcccagcaatagcagcttgaccaccaaaaatcttaacgcctagacgttttgattctgattctctaccattcttcgaactaccgacacctttcttgtgagccatgacgtatgagtttaaatattgttattattctttagtagcttctttttttgcttttggagctgctttttttgcttttggagcttctgcttcagcagatacttcttcagctacaaccgcttttttagccgctgcttttttagttccaccagctgcagtaataccttcaattacaatttgagtaagatattgtctgtgaccatttctctttttgtatccttttcttcttttctttttgaaaacgataactttgtctccttttaagtgttgtaacactttagcttctactgaagcaccttctatagctggggcgcctaaagttacatttccgttatcgtctaataaaagaactttgtcaaaagaaacttttgaaccttcttcgttagccaaacggtgaacataaacctttaagtctttgcttactttaaattgttgccctgctatctctacgattgcatacataccaaattgatttattgatttttaaggttgcaaatatacaactaataatttactgtgcaatcccttattctaaaaatatttatttctgctttatgtctgtttttcaaggcgtttctgcactccaaaaaagctatttagaagtaaaatactgttaaaatttaatcatttcatccctgttttcctaaatgctaattaaaaaaacctatttttgatgtaacgataatcaactcttgactacctatttattaggtaaatataaatttattaatctttatgaaaaattcaatcattatgttaagtgcggcactaatgctcggcggagtggctcatgctcaaaaggtagcttttgaagaatacaatttagacaacggtatgcacgtcattttacacaatgatccttctgctccggttgtgattacctcggttatgtaccatgtaggatcaaaagacgaacgtccggaccgaacgggttttgcacatttctttgaacatttattatttgaaggaactaaaaatatcaaacgcggcgaatggatgaagattgttactgctaatggaggtgtaaacaacgccaacactactgacgacagaacctattactacgaagttttaccttcgaacaacctagaacttggcttatggatggaatcggaaagattaatgcatccgattatcaataaaattggagttgacactcaaaacgaagtggttaaggaagaaaaaagactgcgttatgacaatcagccttacggaaacatcttgccggttgtaaaagaaaatatgttcaaaaaacatccgtaccgctggaccactattggttccatgaaagatctggatgccgcaactcttgaagaatttcaggcattcaataaaaaattctacaccccaaacaatgctgttttagtggtggcaggtgattttgacaaagccaaaacaaaagaatggattcagaaatatttcgctccaattccaaaaggagaagaattaaaaaaacaaacttacgtagaagaaccaatcaatcagaccataaaagccacttacgaagatccgaacattcagattccaatggtagttgcttcgtacagaacaccatcgatgaaaaccagagatgcgagagttctggatttgatttcttcttacttaagtgatggaaaaagctctaaactgtacaaaaaaattgtagacgacaagaaaatggcgcttcagattggagcagtaggatttagtcaggaagattacggaatgtacattttatacggcttgccaatggctcctaatacaacagccgacatcttaaaagaaatggacgaagaaattgtaaaaattcaaacggacttaatttctgaaaaagattatcaaaaattacaaaacaaattcgataataattttgtgaatgccaattcaacagtagaaggaatagcagaaaatctggcttctttctatctgctttacggagatgttaatttgataaataccgagatcgacctttatcactctatcaccagagaagagatcagagaagtagcaaaaaaatacctaaaccctaaccagcgtttaattttagactatatcccttcaactaaagctcaaaactaagtcatcgaatcatgaaaaaaatacatacatttttaatccttttattcctaactggaattatgcaagcacaagaccgtccacaaccaaaaccaggcaattctcctgtagtcaacatcaaaaagccacaaacttttgttttggcgaacgggatgaaagttttggtggttgaaaatcataaattaccaagagtaagctttactctaacccttgataacgctccttttgcagaaggaaacaaaaaaggggtcgacgaattaacaagcgccttaattggtaacggaactaaaaaaacaacaaaagaaacttttaacgaagagatcgacttttacggagcaaatattaatttttcttcatcaggagcttccggaagttcactttccaaatattcaggacgcgttctggagcttttagctgaaggagctttacagccaaacttcacgcaatcagaatttgataaagaaaaagcaaaattaatcgaaggacttaaagccgacgaaaaaagtgttccggcaattgccagcagagttgttgacgttttagcgtttggaaaaaaccatccatccggagaatatctttcagaagcaacagtgaaaaatgtgactcttgctgatgttcagtctaattacgcgacctattttgttcctgaaaatgcttatttggtaatcataggtgatgttaaatttaaagaaacgaaagctgctgtagaaaaactttttagcggatggaaaaaacaggctacgccaaaaaacacctatccggctcctgaaaatgctgctaaacttcaaattgattttgttgacgttccaaatgcagttcaatctgaaatttcattggtgaatacggtgaatttgagaatgagcgatcctgatttcttccctgctgtgattgcaaatcaaattttagggggtgatttcaacagttacctgaacatgaatttacgtgaaaaacatggttggacgtatggcgcaagatcaagtatcgacggaggaaaatatgtaactaaattcaaagcttcttctgccgttagaaatacggttacggatagtgcagtggtagaatttgtaaaagaaatcaaaagaatcagaactgaaaaagtttctgaagatattttgaaaaatgtaaaagcgggatatattggacgttttgtaatgcaggttgaaaaaccacaaactgttgcacgatatgctttaaacattgaaacagaaaaacttcctgccgatttctacgaaaaatacattcaaaccatcaatagcgttactgccgatgatgtttatcgtgttgccaacaaatatttcatgctggacaatatgagaatcgtaattgccggaaaaggatctgatgtactaacaggtttagaaaaacttcaaattccgattttctatttcgataaatacggaaatcctgttgaaaaaccagtaactaaaaaagaagttccagccggaattactgctaaaactgttttcgaaaactaccttaaagcaattggcggagaaaaagtagttgctactgtaaaaacactttcgatgacaggatctactactattcctcaagctccttctcctttgacttttacttctaaattagattcaaaaggaaaaatgatggtatctcttgcgatgggaccaatgaatttaatgaaacaggttgtaaatgataaaggtgcttatatcgagcaacaaggacaacgcaaaaaccttgaaggaaatgatcttgccgaaatgaaagccagcgctgctccgtttgaggaacttcaacttgtaaaaagagccgacttaaaagtagaaagtattgaaccaataaacggtaaagatgcctacgcaatcaaagacggtaaaacaacttatttctatgacgttgcatcaggattaaaacttgccgaatcaaaagttcgtgaacaaggcggaaaatcagcaacgcaaattaccaacttcaacgattataaagacgtaaaaggagttaaaattcctttcaatatcgttcagaacgtaggttttgagttagacatcaaaatgtctgatatcaaaatcaacgaaggagtttctgaagcagatttcttgtaagatactgagatgctaagatactaaggtgctgaggcgctaagattttttttaggcttagtcagagtttaaaactttgactaagccttttctttttttgccaaacagagcgaagtcgaagctttgtcaaactgaggcaaaacaaagctttgtcagaccaaacgaaatcaaagctttgtccggctgagcgaagtcgaagttttgtccgactgagcgaagtcgaagttttgtccggctgagcgaagtcgaagcccccccgttccaattggtacgcccttcgactccgcttccttcgactccgctcagggcgacaaaacaaaacaaaacaaaacaaaacaaaaagaaggctgtcaattacgacagcctttcttattttaatcattcaacctctaaataaggacttaaaatttctgctaattcattcagccagtagaagccgttttcaaggcttgttttgtctgtctcaaatgtttcacattctctcatcatacttaaagcaagcagataatttacttttcgaatggtctttgccataaattcaggatctaccgatttgttgaagaaatcaatcaacttcaattctgtttctttcgaaagggtgtttgtactcataatcttaacttttagggaaatataaaacccgcatagctaaggtgtcctacgctgttaagaaagcgttacggtcgtttccaatcccgccaccatactacacgggcaatttttttttctaaattcataatcttaactattaggaccataaagatacctaaaaattttaaatgagtaagatttttcagtcaaaattaaacacaaaacatcgcatgtcatttcgacgaacgagaaatcacaccagaatcccatcccaattatcgtcaatctttgtcgaattacgagtgtgatttctcccttcggtcgaaatgacaacttcacgataaatcaatgtcaggctgagcgaagtcgaagcccccatcccaattgtcgtcaatctttgtcgaattacgagtgtgatttctcccttcggtcgaaatgacaacttcacgataaatcaatgtcaggctgagcgaagtcgaagcccccatcccaattggcacccttcgacttcgctgagggtaacattcgcacaaaatcaaaatcacatctaaccttttacaaatatcatttcacagctaaacttacttcttagccgataaatatactccaatcaaaattataaaagcaccaaaaaactgaattggcgtaagcatttcgttatccaaaagcccccagaaaaatgccacaatcggaattaaatacgttaccgaagttgcaaatacaggcgatgaaatttggattaatttaaaaaacaaaacattcgcaattccggttccaagaacccctaaaatcatgacaaaccaaatagaatgctgtgtcgcttcaaggcttattctttgcggaaaatcggtcgtactcagaataagcaaagccggaataagcaataccgcaaaatttccggttgtgatgctgagcgaatttaaatcggataagtattttttaatcagattgacatttatggcataactaagcgttgcgataaccaccagaatcacataataataattttgtcccggatgcgaagacgctccgcttaaaaccaacaataaacaccccaccaaaccaataaaaacgcctaaaacctgtcttttttgaaattggactccaaaaataagtatccctaaaatcaatgtatttagaggggtaagcgagttcataatggctacaattgaactgtcgacttcggtttcggcaatggcaaaaagaaaagccggtataaaagttccgaagaaagacgttatggcgacaaatttccactgacggcgggagatcttcttcaaacttctgaacccgacaatcaataaaaataaagctgcaaaaataatccggaacgaacctacctgaactgctgtgagtccaaccaaacctcttttgataagaataaaagaacttccccagattagtgaaagcaccaataaataggcccactttaattgttttgcatccataaaacgtattttagtgcaaatttgtaataattttacgaattgacctcttcctttttactaattttgcaaagaacattttttcgcaaattaaaatcttaaaaatatgaaatttacaagaatcatagcttcgattgctattgcaggtttagtactggtaagctgcaaaaaagaagaagataaaaacctggctaacatcaaaaatatagaatcagctccaaaagaacacaaagcaattgccgctgaaaatgtacagacttcaagttttaaaatcgaaggaatgacttgcgcaatgggatgtgccaaaacgatcgagaaagaattatcgaatctggacggtgtagaaaaagcaaccgttgattttgagaaaaaaacagcaactgttgtatttgacaaaacggttcaaaaccaggaaaatttaaccaagacagttcaggcaaccggagacggcaaaacgtataaagttttagatatcaaatcgtaatttgacgatggttcagttctaaaaagactgacaaaaaataaatctttaaacagtagtaaactcaggcttgctactgttttttttatgaatcatttcaatacagccctaaaaaacaatggaacttaaatttagccacatagacattttagttaacgacctgcaatcggcatgcgactattatgcgaaaatcctcggagcagagatctcaaaaaaattcacctgggagagagatgaattacacgttgtatatgccgttgtaaaaattggtcaggaacgatttatgctggttcagcctttttccggaaatctaaggaatttattggaaacaaaaggcgaaggaacaatttatcgccactgctattccactcccgacatcgaagtggcttttgatgaattgatcaattcaggcgtacagccagaggacgagaacggaaatccgctgtcacgagaaagtcttaacactccaagtggtgttagaatcatctggcttccgaaacgttttggagaattctcgattgaaatccttgaagaatcaggacttcaacaatttatgaatgaagctttttctgcttcctaagttgtggaaaataaaactcgggggccatatcgtgtaaatctgcttttgccccttcagggcaatactccccatttatttagttcatagtgcgttgcactatgctcgtttttcttttgggctttcagcccgcttcatccgcaatttttatacctgatcgtaaattttctcagttcacaggtttacggattgatccaaaattcagcctttacaaacccaaaaaggctttcaaataaaatgcccccaaatagtatttaactttttgagggcagtataaaatcaagtctatcgtttatttccactttaatgtttccattagtctttgcatatcatttcgaatataactcgcagccggcataaccgaatcgaaattaggcttcgcataaaaataaaccgatcctgtgataaagtgttttgtactgtctgtaacgtaaaattgtgagtttgtagcggcatttccgtctacgcggtaaaacattccgtaaacctttttttgagggtttaaataaggctgttctaaaatatcatctgctttaataacatgctcgtaggttaacttctgagcatctttgagcaatttcacaatatctccatgtaccggcttataagtgaggtaaattgtagctttcatctttggataggtaatcgcaaatccgcaatttttctctcctttgattacggccgcttcattcatttcaaaagtaaaagggcaattgttttcaaaacctacatatttggcttcaggatagtccaaacgaaggaaaccggcaggttttggcactacatcatctttacaacttaaaacagtcaatgccagtaaaattgttgctagtgaaatggtcttttttagcattcttaatctattgttacttttatttgttttacacgtttcttatccactgtttctatagtaaaaacacagttttcgaacgctattttctgatcttttttagggaaattacccaaaatctctaaaatgaatccggccaatgtctcggcttcacctttatgagattcaaagatttcttcattaaccgctacgattctgtaaaaatccttgagattaatttttccttcaaaaagaaaattcttttcatctatctgagagaaattcaaattctcgtcgtcaaactcatcactaatatcccctacaatctcctcaataacgtcttccagagagactaatcctgacgttccgccatattcatccaccactatcgccaaatggcttttaaggctctgaaaatccttcaataaattatccagcttcttgttctccggaacaaaaaatgcttttctgattaaagaggtccagtcaaattcttccttatcaatatgcggcaacaaatccttgacaaacaaaacgccttctatctggtctatattgtcgcgatataccggaattctcgaaaagcctttttctattattttaggacaaatcccggaaaaaggttctgacatttctaaagcaaaaatatcaattcttgggctcatgacctgctttgtatcagtattaccaaaagatacgatcccttccagtattttttgctcttctgttgacgtaccttgtgaatctgtcaattctaaggcttgtgaaagttgatttacagagaaattattcttctgtttccccaatttatgatgcaaatatagcgtaacacttcgcatcggcaaactgattggagtgagtaatttatctaatacagccaatggataggcagttcgttttgcaaattttacattgttacggctggcataaactttaggaagtacttccccgaacaacaaaattagcgaagtaaccagaacaatctcaagaataaacttaagggccggcgactctatgtctccaaaaatattccggcctgtaaaggaaaacagaataacggttgcgatattaaaaagattattagccactaataaggtcgcgagaagtttcttaggcctgtccaaaaggtcggaaataatttttccttttgaatgattctcctgcaaggtgtcgtcgatatctttttgagacaaagagaaaagtgccacttcggcacctgaaactatcgctgataaaaacagcaaaataaatattccgacaaagccaattatcaaattgatgtctactgtcgtattaagaaacaaactgggctccgggtccaaattaaaaagaattagttatacattcaaaaaggcagatcatttataggtaagccttcatttgctgcgtcaaagttagtgttttttggtgactcactgtcctggttaggcttatgatttccggtttcttttttggtattcaagaaagtaaactcagtcacctgaatttctgtggtatattttgtagtaccgtcttcagcttgccattgacgtgattttatacgtccttcaataaatatcttgtctcctttcgacaaatatttctcgcaaatttcggccgctttattacgtacaactaaattgtgccattcggttgaagttattttttcattggtcgttttattgatatacacttcgtttgtagccaattgaaaacgtccgatgcagtttcctccctcaaaataatgcatttttacatcatcgcctaaatggccgattaacatcactttatttaatgttccgttcatagttttttagtggtatttataccaaagatacatttttttagcaaattatttcctgcttttccagaaaattgtgaatcacaattggaaaaggaaaaacatttaactcactagctttcaagccattttctattaaaccctcaattctaaccctccagaactgtatgtgcagatgttggtgcgaaagtttatgaataacagtactttcggcataatcttctatacctataattgtatacgacgaaaaaacagtgtctgtaactgctttcgaaactacatcaaagtctacgattttatccgtttccaaaagcggaaactcatacagattgtgccagattccttttgccgttcttttttgaagtatagtatttcctaaagcatcttctacaatgagataattaaagaaacgattggttacttttactttcttagatttaacaggcaaaacggctacctttttcttttgtaatgctgcacagctatcattaaagtcacaaaccgtacaatcaggacttttaggcacgcattgtaaagctccaaactccattatcgcctgattaaaaatagcagggttatcctttggcattaattcataagccagttcggtaaactcttttttcgttgcaggcgaagcgatatcagattcaatatcaaaataacgagaaagcactctgaatacatttccatccactacaggaacagtctcattataagaaaaggaggcaattgctgcagccgtgtattctccaacaccttttaattttaaaagttctttatagctaggaggaaaaacaccgttgagctcattggcgacatattgagccgttttatgcaaatttcgggcacgggaataataccctaatccctgccaaagtttcaaaacctgctcttctgaagcatttgctaaatcatatacggtaggaaattccttcgtaaaagcaaaaaaatagggtgttccttgcgcaactcgagtctgttgcaacataatttctgagagccaaatatggtatggattggtcgttttacgccatggcaaatcacgtttgttttgtaaataccattttatcaacacgttagaaaaattcattgcaaaatacttagaatacaaaagtaaatgtttatgtaattaaaatttaacgatttagcttgattaattatttttttaattcttatatttgcaaactcaaaaaaatagtacaccatttataaaataaaataggaaagaaaatgacgaaagcagatatcgtagcgaaaatttcggagaaactaggtcttgaaaaaggagatgttcaagcaacagttgaaacttttatggaagaagttaaaacttcactagaaactggagacaatgtttacctaagaggttttggaagttttattgtaaaaacaagagctgaaaaaactggtagaaacatttctaaaaacactactatcaaaattccagcacacaatattcctgcgtttaaacctgcaaaagtttttgtagaaggagtaaaaacaaataacgaagcaaagtaatactattaattaattataaaatcgacacgatatgccaagtggtaaaaaaagaaagagacataaggtagctactcacaaacgtaaaaaaagagcgagagctaaccgtcacaagaagaaaaagtagttttaaactacttttttctttttaaacgttcattgaaattggaattgagtctcagtaaacagtcacagtttgcagcctaaaactgttaactgctactgctaactgcttacaaaaattcccccgggttcaatacctgttaaaaatattgtttaatccatccttacaattaggccttaagctataagctttaagctttaagcaaatttattttgcctattgcctactgcctactgcctattgctagaaagttcggataaaaatttacagtgtgaataaagaattaatcattagatctagttctgaagccgtagattttgccttattaaaagatggaaaactaattgaattacacaaagaagaagagaaaagcaactttcaggttggtgatatttttattgctaaaatccgaaaaccagttgccggacttaatgctgcttttgtaaatgtaggcttcgaaaaagacgcttttttacattatcacgacttaggtccaaacttagcttctcaactgaaattcataaaacttgtaagcgcaggtaaaataaaagatttctccctaaaaacctttcagtttgaaaaagagattgacaaagatggcatcattactgatattttaagtgccaatcaatctgttttagttcaagttgtaaaagaacctatctcgaccaaagggccaaggataagcgctgagctttcactggcaggaagatttattgttctcgttccgttttctgaccgtgtttctatttctcaaaaaatagaagacaaaaaagaaaaggatcgtctaaaaaaacttgttctatcgatcaaacctaaaggatttggtgttattgttcgcacagtagccgaaggcaaaaacgtagccgaattagaaaaagatttgcagaacctgcttggcagatggactgcaatgtgtaaaaaattaccaactgctcatcatccctcaaaagtattaggagaactcaacagagcttcttccatattaagagacgttttcaacgatacctttagtggtattcaaatagatgatgaagagttgtaccatcaaacgaaggaatatctgcaagaaattgcaccttcaaaacaatcgattgttaagttttatcaatcaaatgacactccaatttttgagaaatacaatatagagagacaaatcaaaacttcttttggaagaaccgtctccatgagtaaaggtgcttatcttattatcgaacatactgaagctcttcacgttatagacgtaaatagcggaaatcgttcgaataaagcaaccaaccaggaagacactgccatggaagtgaatatgattgccgccgccgaaattgccagacaacttcgtttgcgtgatatgggcggaataatcgtagttgattttatcgatatgtctaatccagaaaacaggaaggttttgttcgacttcttgcgagaagaaatgagcgacgataaagcaaagcataaaatcttaccgcctagtaaatttggtttagttcaaattaccagacaacgcgtaagaccagaagttaatattaaaaccagagaagaagatccaaacaatgaacatggcgaaattgaagcgccaattttaatcattgataaaatctcatctgatttagatagaattctaaaaacccacaaaagtgttgtgcttaacgtacatccgtttgtggctgcatacctcagtaaaggttttccatcattacgttcaaaatggttttttgaacataagaaatgggtgaaaatcatacctcgtgacgcttacacgtacttagaataccatttctatgataaaaaaggaaatgttatttcagaataaaaacaaaaccgtctcgttttttttaacgagacggtttttttatgccttttcgcgaacctaaactgtaaaccttattaaacaagtataacatcctaaatagatccctgaaaaataatagataatatattatccaatatagtataaattttgtatatttagctaatattttagccaaaatgaaaaactactccatcaacaaaacacctagtcaggttcaaagtgaattagccgagcaattcagaaagttcagaaaaagcaaaaaaatagcacaatctgaattagccaataaatctggcgtttccctgggaagtatcaagcgttttgagcaaactgggcaaatctcactagaatctctattaaaactcgcccacctctttgatcgattagaggatttcaattctatatttaaaattgacaccaatttaaaagaaattgaaaaattatttaaaccttaattatgcaaaatacttcaaaagtaaaaacctttttaaatcttggaagccataagacagaaataggtgatttagtgcaaaataaaaacaaaatctatttcaaataccatcccgattttatagaaggcagcttagaaatttcaccctttaaaatgaaattatccagagaaatcctcactccgaacgaacttcattttgacggactttttggtgttttctctgattctattcctgatggatgggggaaattactgcttgacagaaaattactctctgaaggaatcagcttaaatagtataacagcattagaccgattaacttttattgataataatagcattggagccatttcatatgagccagaacatgaaaacacaaacaacctttcaagtaacattgatttagatcatatttcagatgaaataacaactattctaaacggaacttctgaagaaataatagaagaactgtttcaacttggaggctcatccggtggagcaagacccaaaatcttagtaggctttaattccaaaacagaacaactattttatggaaaatctgatttaccggatgatttcgaacattggatcattaaattcccttcttctaatgatttgccagacatcgcattaattgaatacgcttacaataaaatggcgcaaaatgcaggaattgaagtcaacgaatttcgcttattcaaaagtaaaaaaggcaattatttttttggttgtaaacgttttgacagaataaagaatgaaaaaatccaccttcactctgtgtcaggattattacatgacaactacagaatgagcactttagattacggacatttaatggattgtgcatttatattagaaaaagactttaatgcctatgccaaagtattacgattggctacttttaatgttttggcacataacagagacgaccatagtaaaaatttctcttttctgatgaataaaaatggagattggaaattttcacctgcttatgatctgactttttctaattcctcatacgggcttcatagtacaactgtagccggagaaagcaaaaaccccggactaaagcaactacatgaattagcgagacattttggtgttaaaaatgcgaatcaaatttttgaagaagtaagtcaatccttgagtctgttcgaaaaaatagcatcttccttagatatcagcaaaagctctgtcaaactaataaaaagcaatttattagtttaatcccatttttcaaaaaaaatcaaatgtccgtctgcgcaaagtcaaagatacgccaggaaaaacttctatcccgctcagacagaaaacatcctgatctctaattggtttttagaatttaaactttgcccctccttttactccctcacaatttcaatttttcgtctgatttcattgccagaagcatctactactgtgatataatgcgttcctgaagtaggcgtaaccggcaattcgtgaaaagtttttgtggtggctttataaacgtcatccacgtaccaaaaaagctctttttctctttcggaataggctacttttaaaatcacgggctgaactttgctattaaaatctttggttaaataaattttaccattggttttgggataaataaaatccattgttgtggtttgtgtaccctggcagccttctttaaacggaggcaaaggcaagtactcaatatgctggcttttgtaataccatgccataaccggaggcagaacaaaccagttttttgtcaccatattatcaatactctcacaactgctgtttacctgaaattgtccggttatatcgagatgaaccgttttgtgatacggacaaacgctggtcgatttcccttttttgggaacccattgctttattttcggacagccgtctttggccaaataaccgcttaaacgacaaacctcaacttctgctaaatctttataaggcgtttgaaaccatctttgtcttggcagtaaattaaaaacatcaaataaaatcggtgcggcacttgtaactcctgttaaagtaggcctcccctcacctgttgcattcccaacccagattcccaccacatatcttgaatttgtaccaattgcccaggcatcgcgattaccaaaactggttccggttttccaggcaattttaagcgagctgtcgtaaaacttccaggcttcatctccttccggcctgttgacctcttccatggcgttgtaagccgcccaaattgatccggcacccaagatattcttctgatcactttcggagccaaaatcgggctcaaaattgctcttataatttaattccgtaaattcattcgttcggtattgagcctgattcttaacataataatttagtgtagaagacagatttgcatacgttcggcataaatcccacaaattgctttcggcccctcctaaaataagggataatccataatgatcgggtgttttattgatatccttcaatttaaatttctgcaattcctcataaaatttattcacgccaaactcctgcagcatcaaaaccgacgggatattgagagagcgcgacaaagcccgatgtgccggcactgctccgtcaaaggtcagattgaaattttgcggagtataccctgcaatctgtgttggaatatccgcaactaatgtgttcggcagtaattcaccatcgtccagcattcccgcatataaaagaggtttcaagatactccctgtacttctgggtgcgtcaataatatcaacatctttttgatggtctttatcggttggcgcattccccacgtaactgattacatttcgattggaaacatcaatgaccaaaatcgccagattgtgtacttcattctgtttgtattgattgtaataatatctcgcaatttgattgactctgttttgcagcgcataatcaatcgtagtctttacccttgttccttcctgatctttagcggctctttgcaataaatgaggcgctatctgaggcaaatcatacggtttttgaggcaaaggttcttcaatagcaagttcatacgtttgctgatcgattacaccttctttatgcagtttaagaagaagtcggtttcgcttgttcaataatttgatctgattttttcccggatagattagactcggtgcattaggtaaaactgccaaagtagcgttctctgcccatgataattgattggactgaacgccaaaataacgccacgaggccatttcgagcccgacaacattgcctccaaacggagcatgggccgcatacaactcgagaatttcatctttagaatagcctaactccaatcgcgtggcgagaatcatttcaatcaatttttcaaaataggttcttccttttccttttcgggacaatcggatgacttgttgcgtcagtgtgcttcctccgcgaactacttttcctgctttttggttttgtttgatggcatttaccatcgcaaccggattaaaaccggggtgtttatagaaatattcatcttcaaaataaacaatacattttttgaatttatccggtacactatcctgcgccggaaaacgccattgcccgtcaggagcgattttagcccccagcagttctccttctttactttcgataaccgttgagtacggctctttaaacaaggttcggggaatggagaaataataaatcagcaagagcacaaatgcaattgctgattttattttattctttttaatccaatttataatgcgttgtgaaaacgctatgagtttatttttcaacgtaatatttatttaaccgcgaaggcgcaaagtccgcaaagtttttttgctcgcagatttggcagattttcttttctcttttaaatctgcaaaatctgcgtgaaactatattttactacaaagttcacaaagttttttagccacagattatacagattaccacgattattttctttcgctacgactcaaacgatagcgaactaccaatctttcaatgaacttcccatgttttgcggggtgcaaatgtaatacccgttttcgaatctcgcaagctttttcgaatctttttttgaaaatttcttttcatcttaattcgtttgcttgtcagtatttcggtgaacgtttatcgctgttgcgggtgcaaaagtagtcactttatccgctttcacaagctttttctaaacttatttttaatcttttttaaaactttttcttaacagtctgataacacctcttttacaaattaaactattttcaggcttgaaagatttttcttctctcaaatgaaactcttagatacaaagccccatttttactgggtttttactaatctcgcaatgacgcaaacgcgcgaggtttttgttttatggccgatctttcctttgaaaatccatgccctagccccgatagtagcggataaaggcttcgacttcgctcagctcgacaaaaactacactactattatagtatagaatctcaaataccaagcttcgacttcgctcagccggacagaaactacttttcttgcattttcgctcagctggacagaattactccttatatataggtagtaaaaaaacaaaccctacaggttttaaaacctgtagggttgtatatacactccagaacaatacaattactcgaaacgaatagctttaaccggagaaatctttgtgattatataggaaggaatcaacagtactacaaaacaaactccaaccgtaagcaaattcaataaaacaatatgccaaatattaaaatagaccggagcctgatttacatagtaattttcaggatttaagcgaatcactccaaactgctgctgaattaacaacaaagcaataccaattaaattcccccaaaacaatccccgcacaatcaaatagaacgcgttatataaaaacactttacgaaccatccagttattggctcccagtgcttttaaaatcccaatcatctgagtgcgctccaaaatcaaaaccaatagcgccacaaccatgttaatggtagccaccaatatcattacccctaatattactatgatattaaaatcgaaaagctgcaaccaatcaaatatataactatacttctctattattgttttggtatccagattagacgatgtttgatcgtagattttttctcccgttgttttaatagcatcaaagtcattgatgaatacctcaaaagcaccaacctgattgggactccatttattaattctttgaatatgtctaatatcccccaatatataggtggcgtcaaaatcctgaaaaccggaactaaaaacacccgctatcctgaatcggcggctattaggcattttcccttgttcttctttgataaaaaaagtattaaaattatcacctactttaagatgaagccgatctgcaaggaattttgaaatcagaacatcttcgtttaaagcagctgaaaaatcaggtaaccttccttccaccaaatactcttctatatttttccagtcgtaatccgctccgactcctttgaagattataccttcaaaagaattctctgtcctgataattccagctttactagcgattgcctgaatatgactcacctcaggaactgatttaaattcaggataaaactcctgttttttagaaataggaattaaagtaacatcagaattgttattatcgtagtttgaaattataatctgcccgttaaaagctgaaactttatcccttatttttttctgaagaccaatccctgtcgcaacagaaacgatcatcattatcataccaatagcaatggccgaaatagcaattttaataataggcgccgaaatactgctcttaaaatcttttgcagtaattagccttttagctatgaaatattctaaactcaaattttatgttgtcttgaaattattaattacatccgtttccggttcattcgaatcaaaagtacattttaaaaagcaaaaatgaattgcttctaagaacaattatcaaatgtttagaaggttacaaaggaagctttttcttcatttcctccactatattatatgctgcaggacaaatagcaacattcttcaatgttaagtccgctatctgatgaaactttttacgatctgtatgtggaaattctctgcatgctttcggacgaacatcataaatcatacaataattctcattatccaaaaaagtacaaggaacactttttaaaacataatctttgtcctcatcaattctgagatattgttcgataaattgctgcggcttttgtcggaatgatttcgaaatcctttcgatatcagccaaagtaaacaaagggccggtagttttgcagcaattcgcgcattgtaagcagtctgtttttttaaattcggtgtcatgcaaatcctgcatcacataatccaaattctttggctgtttctttttaagcttatcaaaatactttttgttttcgatatgcttatctttggctaacttatttaagttatttaaaatttgcttcaagtttaagatttaaagttgaactgcaaaattaaacaactttaaacttgtaaccttaaactttgaactaaaatacaatgaaagatcttttcgggaaagccatgtacgatttccaaacccataattcacctgagaatattatcactgaaacttcgatttctgaagaagatgaaatgagtgtggattatttattccgttcgtacaatgaaatgcctaaactcgaacaaaaagcactgcaattagccttcggaaaaactctggacgtaggctgcggagcaggaagccatagcttatctttacaaaatgacagaaatctggagcttgtttcaattgacatttcaaaaaatgcaatcgaaacctgtaagcttcgcggagtcaaaaatgccatagtcaaaaatatcctggattttgaaggggaaaaattcgatacgatcattttactaatgaatggagtcggaatttttggcaaactagacaattgcaacaagtatctttctaaactaaaaacacttctcaacccgggcggacaaattttactcgacagctcagacattatctacatgtttgacgaagacgaagatggcggaaaatggatcccatctcataatgattattacggagagcttgtgttcaacatttcttataaaggcgagaaagaagaacccttcgactggttataccttgactacaatactcttcaaaatgctgctaatgcaaatggattaaaatgtgaacttatcctggaaggcgaccactacgattatttagctaaactttctttataaaacaccaaaacatgaacgaaacagatttagaaatactaaaatatccaatcggaaagtttaaaaccccaacagattatacctcggagtacatttctgatagtatcgccatcattgcatcttttcctgaaagattaaaaaaagaaacaattcatttaaccgacgaacaactagacactccttatcgtccggacgggtggactgtacgtcaagtaattcatcattgcgccgaaagtcacatgaactgttatatcagaataaaatgggctttgactgaaaataatcctgtaataaaagcttatgatgaaaaactatggtcggaattacaggacaatctaaccatgcccatccaaccaaccttacaattactggaaggattacattacagactggcttatatcatgaaaaatctaagtccacaagatttaaacaaatcatttattcatcccgaaaacaactctgaatatctaatcaaacaaatcattggaatgtatgcctggcacagcagccatcatctggcccatataacaaatttaaagaacactaaaaattggatctaaatctgatgtttcttttttacacagtgtatactatttaccagaaacaaaaaatctcttcaattgaagagattttttgtttataccccttaaggaatatttaaatatttatgcgtttgaagcgaaactctccattttgggttgttcatcacatagtccacaatcagaggcgtcatttcttcttttttgctccattctggctgaaggaacaaaattgcgttgtcatttaccagctcggcttgttcttctgcaaaaataaaatcgtgtttgttatagataattactttcaactcatgtgcgttgtcatacaccgtttgagtaggcagcttattttttttaggcgaaagacaaatccagtcccaagtacccgataacggataagctcccgaggtctcgatatgaactttcatgtttttatccttcaactgttgagtcaataaactcatatcccaagttaaaggctcaccacctgtaatcacaacagtatcagccagacttgatgcattatttacaattaaatcaatactagttggcggatgtaactcagcattccaactttccttcacatcacaccagtgacaacccacatcgcagcctccaattcgtataaagtaagcagcagtcccggtatgaaaaccttctccctgaatggtataaaattcttccatcaaaggcaacatcgctcctttatttacttctaattgtatttcttttgataacattattcgattttaaagtgcaaagatagtcaattaaatacggaacaaaaaaaaccgatagtttaaagaaactaccggctttatatttgactgtaaatttatattatttcaaagcttttacagattgtgcagcgtaagcatttgcaggatctaaagctaaactcttattgaaatattcaattgcttttgctttatcagtatttgcataactagcaccgatactattgtaagcttctacaacttttttaactgtagccggcttagccaattcttcagcaccttttgccgtaattcttgttacgtactcttcgtagtttttaatgattaaatcatctttttctaacaagttgttgattctacctttgtacaagtaagcctcattataagttggagaagcttctaagattctgtcaaaagcaacatccgcttttcctaaagctacagcatctgcagctccatttgttttatttgcgttagcataataaagagaaataccgtagtaaatattatcatctaagtagtttttagactctttgttcgttgttccaagctctaaaacagtagcagcctgagcaaattgttttttcccgaacaaagcttttcctaaatcagataattcctcaaccaccaaaggctctagttcgatcgcttttttgatatcagctacaccagcatcaaaagaagtctgatcaacagttccgtcagctgcggttccttttttaatcttagacaaacctaaatacaaataatctctaccaattactttgttagaaggcactttgatataatcttcaatagatttgattgctacatcaacatttccattctcaaaagcagcataacctaaatatctgaaaattctaggatttaccttatcctcagcaatcattttgtttgcaacagtctctaaacttttgtaatctttaaccaagatcaagaaatctgcgtgacgcattttagagtctaaagagtaatccgtaagatttaagtacttctcgtagtttgtaattgcattttgcatgttaactttagaagtagatggtttatttcttccccatttataataagtctccgctaactctctgtaaaccggaccataattagcactcaaagcaataacttcattaaaagatttaattgcttcatcataagatttagccccttttaataaaactcctagttgcatttttgctcttaaaagtgttggatcagctgtaaacgcatcacggtatgccttgtaagcatcgttttgattgttcgctccgtagtatgcatcaccaatagctaaaagtgccgttgcattttgaggatcaattaccaacgcacgcttcaaaacagctatagcatttgtataatcaggtgtagaagaattcatgtaagctctaccaatgtaaataaattcctctacatctttacgtttcatatcttttgtagctaaagcaaaatttgcctgagctgcagcagcattcttcgcatcaagatctaactgacctaatccaatataatttaagtttttcttatctgatgcctgtaaaccatttgcataataaattttagcagaatcaatgattgcctgatttaaatacacattacctaaaacaaaattagcttctccatcagaaggctttgctttgatgattgattttagcaatgactttgctttttgaaattgctcagcatcgattgcttttttagcttctttgatatcttgcgcttttactacagtagctgaagcaactaaggcaagactaaaaattttaaatttattcatctctaattgtaattaatttattctttatcttttactatttgattccttattttaagctttcttccaggagttctaaccggtaacaaccctgatttcaaaactatcctctgtccaatatcgccggcaataaaggatgcaaatcccattcctaagccagaataaccctggcaatttatgataaacaaatcacgtgccaaagggtatttcacttctgcaagatcattctgagttgggctgtaatattgattactgtttaatcccttaacactcatcacatttattctcttaagcacttctgccatttttggtgacggttgagaaagccagtttacaccaactaccccaatcataccatcattctcagatacaaatttaataacttcatcgttcgttttaaaagaaaacactccttttacaggaacatcattaactttagccaattctttcatataacgtacggtacttgaatttggattgtcaaacaccagtcctttaattcttgcatcaggtttgccctgcataaaatcgattaccgttttcaacgctattaatgtatcattattgcctttgttcgaaataaaagctattgcatctgtcgcaaaaggggtaactctgggttttattttacttttttcgaatttagccaattcttctttagtcaaatctcttgttgtcaccactactgcagctttctgattgagcaaatcatttataagctcagcttctgacttaggttttaccgtaatctttgcatcgtagtaagttccttcaaagacagcaacctgatcgtccacaataggttttacagtttcatcgacagtaatatcgattgctccttttaaaattgtttccttatcgtttttacttttttggttgcacatggcaaacaaaaaaacaaaaacaaccaagcctgcaatcttactatactttaacataattattctgcgtttgaattaattaatctcaaaaaacgaatggccgaatacactatcaataatcctccaaaagcatatctatacttttgctccatatttagcggaagtttctcccaaaacatgatcattaaaccgagtacaagatatattaaaaagaacagtattcctaaaacaagaagaaatcgctctttgagcgatttcttctgaatattattaagtataccttttaacattattctgcagattgaatagtaataggcagagagtaaagtaccctaacttttttaccattttgctcgccgggagtccattttggacactttttaagaacacgaattgcttctgctcctgtaccgtaaccgatatcccttaaaactttaatgtcggttaatgaaccgtctttttcaactacaaaagtaacataaactttaccttttaaaccttcttcttccggagtcttgtaattgtttcctacgaatttgtagaatttctcaattcctccagggaaatctggttttacttcgatacctgcagtattataaacgttgttatcttctgcaatgatctctgtaactggtcctttaccaactggctcatcaacagttaaaactgcatccggatctcctttgatggtttcgttaccaacttttttatctttaagttcctcaattttcggaggatcttcagtaacttcatttgccttagcaacgaccggtttcacgaacttcacctgatccacttttggtggtggtggtggtggtggcggttggtttggctttacttcctcttttttaggaggtaattttactgtcgctatcttgatatcattattcacatcttcttcactagaatctggaagtaagcttgcaataagaggagccgctacagcaaagctaaaaataaccgatccaataataagagactttacagtcgtcttaccgttcgattttcttaactcatatgcaccatatatcttattacgcccttcgaatacgatatcaagccactgatttttaattatatctaatttcatttttcttgattattaggaggttcaaaaaaagacaacccttattgtttatcaatcaattttgtttcctcaggtgaaaactcaggaacgatagcataagtatctactccagtgatagccatctcatccaacatatcaactaaattgcggtaagttgcttttttagttggcttaatgataactataattccattcttaggttttcctaaagcagcagaataagctaatacttctttcttttgcttcaataactccttacgaataccatccttaccatatgcaatatctttaggcccaaccttaggtgttgccaataatcccatataatataccattttattgttttcccccatcataacagtcattgtacgattctcatcaactttaactggaggtgtcttatcgtctggatctttatctggtaaagacaaatccatcgattgaggttttgacaacgatgtggttaacataaagaatgtgatcaataagaatgccaaatctaccatcgccgttaaatcgactttcgagttttgctttttacttcttactttaccaccttttccgccaccaccgtcgccggtatttaattcagccattttagtgtatcttttttaattaaaagtcttttcctctcatacctgtaactaagttaaaggaattgattttttgatcttgtaaaatatccataatctttttgatttgtggatactgctctttagcgtcacctttgatcgcaatctgcaattctttatcatcaaggtcaattgcggctcttcttgaaaccaaaagccattcttttaattgattgtctaaagaatcaattggaattccaggttgatcagctttcactctatccgcagctttcatagcgataatttgtttcaaatttgctactggtacaccgaagtcatccattaaggcaaatttagttttatcatcttctgagaaagtcacaccaaatttagctcccattccttcaagagttcttttacgaatctctcttcctttgatatcaaaaaacactttgctttttccgtctgctcctttacctatcgtaataattgccaaatcagaatctggtaatttactttgaacagtagaagaaggcatgtctacaggaagtgcttctggcaccttagcagtagcggtcaaaataaagaacgtaagcaaaaggaacgcaacatcacacatggcagtcatatctgtcgatgttgacttttttttcatttttattttagccattctcttttattttattttgataaataattaattatataatatcaaaaattaattattgtttcaaacttcctctgaatcttctgtaagtatttacgattgtagtaccagcctcatcgatagagtaagttaaatcatcaattttagcagtaaagaagttgtaagaaacgatcgctaagattgaagtagagatacctgttgcagtgttgataagtgcctcagaaatacctgttgcaagagcagcctggtctggagttccagcagaagctaacgcaccaaacgctttaatcataccagatactgttcctaataatcctcctaaagttcctaatgatactaaagtagagataatagtcatgtttttttctaacattggcatttctaatgaagttgcctcttcgatttctttgtggattacttctgaagcttcttcactgttgaaaccttcttttttaacatcttgatatttaatcaaagcagatttaattgcatttgcaactgaaccttgttgtttgtcacatgaagcaatagcagcctcgatgtttccttctttaatacttccttgtacatttttcataaatgtatctaagttagctttaccagcagctttaccgataacaataaatctttcaatagaaaaaacaacaaccattaaaaacatacctaataatactggtacgataaaacctcctttataaacctgtcctaatgtattgatagggtgaccagtttctggatttccaccttcaaagttagctgcatctcccatgattactttccaaataaacaccccaactaaaatacacgctacaataatgattccagtgatcattcctcctccgtttgaagtgctttcttttttaactttaacgtttgccattttttttaattttaatagttttaaataattttattttttagttatatttaacttgtagaggagcaaatttatacgtttagtttaaataaaaaaactttttttaatttaattgaaggaaatttaacgtcaatttaaaaaatatctcattaaattgccgatatcattttttagataaaacaaaaataagggctaataatgggaaaattacaacgttttagtaaatattcaaacattccattgatatcttcttaaaaagttgcgaaattgttttttatattttttttaacccaaaaaagttttttcctactaaagaaaaacagcctaaaatgttaataaacctagcaaacctcttataatcatctaaattacaaataaaaacatgaataaaaaagacaatttcattcaggatatcaacaatggctattctacaaagggcgacagtattgttctcggaagtgccattctggacggagaaccacttggagaagctcatgtcaaaatccctttaaaaacattaaaccgccacgggctgatcgcaggggcaacgggaaccggaaaaaccaaaacgatacaggttttctctgagcagctttcaaatgtgggagttcctgttttgatgatggatattaaaggtgactttagtggaattgctaaagagggtaaagaagaaggttttataacggaacgtcatgctaaaataaacataccttataatatagcttcttttcctgttgaattaatgtcactttctaaacaaaacggagttcgcttaagagctactgtttcggagttcggaccggtattgttttcccgaatattagacctgaatgatactcaggcaggtgtggttgccgttatctttaaatattgcgatgataataaaatgccgcttttagatttaaaggatataaaaaaggtcctcaattatattaccgaggaaggcaaagatgaaatatctgccaattatggtaaaatttcaaccgcaaccacaggaacgattctgagaaaaatcatagaattagagcagcaaggcggtgacttgttctttggtgaactttcgtttgaaattgatgatttaatgcgaattgatgaaaacggtaagggttacgtaaacattattcgtttgacggatattcaggacaaacctaaattgttctcgacttttatgctgagtttattggcagagatttatcagcaaatgccggaaaaaggagatgttgtgcaacctgagctggttatttttattgatgaagcacatttgatttttaatgaagccagcaaggctcttctggaacaaattgaaacgattgtaaaactaatacgttctaaaggagttgggatttattttgtaactcagaatccaatggatgtcccgagtggtgtattggcacaattgggtttgaaaattcagcatgcgctaagggcttttactgccaatgaccgtcaggcgattaaaaaaacagcagacaattatccaacttctccttattataagacagatgagttactaaccagtttaggaattggagaggctttggtaacggcattaaatgaaaagggagtccctactccacttgtagcgactatgatgcgcgcgcctatgagtcgaatggatgttttaactgctgatgaaattgaaggaatcaatactaaatcgaaactcgtaaaaaaataccttgaagaaattgatcgggagagcgcctatgaaattctgaataagaaaattgaagacgccactcaggcggctgcagaacaggaagaagaaacaccgacaaaatcatctaaatctgaaccaagtacagcaagtgtagttggcaaatcggttttaaaagtggttaccagcgctacctttataagaggtgtttttggagttttatcaaaaatattcaagaaataacttatcaaaaatcaatggcaatgccaatgtcaatatcaaaaatcaattgcaatgtcaatactaattttaaattgacttttgacattgctttttgatattgttttttgatattgctattgtaatcgatctatttttgcaataattccagaatcttattttctacttccggactgttccagatgttttcaatattttctattcgtaaaacttgttccataattacattttgaaaatcgccaattgccagggcttcggaatacgggcgatcactaaaagttacacgactgtaaagtggaatccatttatcaggatgtttgtctgagaatgctttttcgattttcttttgcaataagaatttttcatcggccgttttggtactcatctccatgaaatttcgataagacaattcggcaatagcatcggcattcggtttacgtgaaatttgatactccgagaagattttcttccagtcgtctccatactttgcgatcatttcacttaaaatggtaatatcttcaaaacccgcattcataccttgtccgtaaaagggaacaattgcatgacaagcatctccgattaaagcaattttatcttcgtatgtccacggaaaacatttcatggttaccaaagtactggttggatttttaaagaaatcttcggctagtttcgggattacttcgatcgagtcggggaaattcttcaaaaagaagtcttcaaccattttacgatctttaagcgatgcaaatgaattttcgccttcaaaaggcataaacaaagtacaagtaaaacttccatcgagattagggagtgcgattaacatgtactcgccacgaggccatatatgaaaagagttcttgtctagtttatgtgaagcgtctgcatttgccggaatgtttagttctttgtaccccatattcaaaaattcctgggaataattgaacatgttctgacgctgcattcggtgtcgtattctcgagaaagcaccatcggcaccaaaaaccatatcgtattttttctcttcccactctcctctttcggtttcacctatatgtaacgtagcatcatttaacgttacgtcccagattttttgttcgaaaagaaattctgcaccggcttcttctgcaagatcaatcattttccggtttaaagttcctctggaaatggaataaatggactcgccttcctgaccgtagttctgaaaattgagtttatcaaccaagtgaatggcacgtttgtccattgggatagcgatttcccgaacggcatctccaacaccaacaccatcaagcgttttccagccccggtttgacattgccagatttatagaacggcctgagaaattaattttacggatatcaggactacgatcataaacatgaacggtatgacctgcttttttaagataaatcgacaagagtgatcctactaatccggaaccaacaacagcaatttttagtggagtttgcatcaagaaaaatctaaatataagatcgtaaaaataagtaataattgtacataagctttaaaataaataaattatttactgtaccgactcacaaccgtttcgatttttgccaaaattcagagttaattcaaaaatataacaaaatgttattttattcaatttatctgaaaaaattaaactcttacattcgctttcggttttaccttaatatatatccccatcatggacagcacaattttacaatcagaaattattctggaaaacgaaaaagtactattaattccgtttgagagcgaaagaaatacagaactcagagaaatcatttttgatgatgggatctggaaatacatgggtatgtatgttcgcaatgaaaaagattttaaaaattacattcaaaatactttacagcaaaaagccgccgggctttgttatccttttttaatcattgataaaacgaccaatcgggttgcaggaagtaccagatacggttacctgaatcatgctagtcagaagtgtgaaattggctggacctggtacggggaaaaatttcagggaaccggtttaaacaaagcctgtaaatttgaattgttaaattttggatttgaagtcattcaatttagaagaatacaattgagtgctgatcttgaaaacaaaaagtcacaacgggcgattgaaaaactaggagcaactaaagaaggtctttttagaaataactatatcgattcggaaggaaaaagcaaagatgacgtttattacagtattattcccgaagactggcaagcagttaaaacgaattacttccctgaatttatataagaaaagcgcctcaattattgtgatagaaaaatggtactttagcttattctaaagtacctcttctatgactgaattgcagacgatctatcaaagaaccctaaaatttgctgccaaaagacatgccgatcaaaatcaagtaattcccggaaccaatttaccgtatgttgttcatttaagcaatgtaaccatggagattctatttgcttcgcaaaacacaacatcttttaatactgcatttgcaattcaaattgcattactccacgatattcttgaagatacagcaactacatttgaagaacttgcagcggaatttgatgaagaaattgctcaggccgtcctggcactaaccaagaattctaaaatacctaaagaagaaagaatgaccgacagtctggcccgaattaaagcattatcaaaagaggtatgggctgtgaaattagctgacagaataactaatttacaggttccaccagaaaactggagtgtggaaaagataagagaatatcataaacaagcggtacaaatactaaatacacttaaaggcggtaacgcttatttagaaaaaagacttttagaaagaattcaaaattatttactgtattgtaccgtcgaaaaatcgtaggtcacaactcatcaaaacataatctcaaaatgaacctctattcagaacattatgtaagcgaaaaaagcgagcggtttgttaccaaaatctggtgtctggataatggcaatggtgaaacaacagttgaaaataagcttgtcttacccaacggctgttttaatcttgctattgttagcggaacccacatagaagttcacactagtaagcgaaaatatgaaatgaacgaaggcttttacttttgttcgcaaatgacgaacaaggttttggtcaacataagacctaaaaccaaagtaaccatcattcaattgcagccctggacgctttcgatgtatccgcaatatgatttgagccattttagcgattcgattatcaggattactcccgaagagcttccctttaaaatacaaactgatgctgttgctgaaaatttattgcaggctataaatgtttattttgaaaaattgtctgctttacattcagagaaaaataccatcgaaagaatctgcgaaattatcagacatcatgacgaagaaatctcagtttccgaaattagcgggattttaagagtctctcaacggttgttgcagatgaagtttaaaacggcaacagggcttacgattaaaaaatacattcaaattctgaagttcagaaaatcagtagatcagatggtacattcgaatcctgagaaactcagtctgacagagattgctctttacaataagtattttgaccagtcgcattttataaaacaatttaaaggagtcatgaaaacaactccaaaaacattcaactctagtttgtactttctttctaaaaaaagataagattttcgcatttgtacaatttttaggttttagattgcagtactattgcaaaatcatcaatcaatcaaaattaatataaaatgaaaatcaatccatctcttttcccgttaaaagtttttttaattggaatattacttttccacttccaaaccggattttctcaggaagaaaaaaactcagcattgtacaaaacgattatgtcaagagacagccttctttttaatattggctttaatacctgcgacattagccagtttgaaaatctttacagtgacggttttgaattttatcacgacaaggacggtccttcagataaggcactttttttagtcaatctcaaaaaaggcttatgcaaatcggttgaaacttacaaagccagaaggtacctggttcctggcagtaccgaagtttaccccctctataacaaaggcgtattgtatggcgctatacaaatgggaattcaccaattctacgaaaaatcaataggcaaaaacgaatcttttgcagatgccaaagaaaaatttggcagtactgcgcgatttactcacctatggattttagaaaatggtgattggaaacttaaaagatctctaagctacgatcatcaggaggccaatacagcgggtaccaaatcggatatttttgacaacgatgaagccattaaaaaatggctggttcagaataatgttccagcactgggtattggtgtgatcaatgagggaaaactacaagaagtaaaagtctttggtgaacttaaaaaaggagttgcagcaccctacaatacgatttggaatgtggcttctctgactaagccaattactgcaatggtcgctttaaaattagtaagttccggaaaatggaatctcgacgaaccactttacaaatactggacagatccggatatcgcaaatgatgcgaatactaaattattaacgacgagaattgtcttaagtcaccaaaccggttttccgaattggaggtatatgaacgaatccggtaaactggatttcaaattcaaacccggaacaaaataccaatactcaggagaaggcatggaatatttgcgaaaagctctggaaaaaaagtttcacaaatcattggatcaattagcggatgaattaattcttaaaccgttaaaaatgaatgataccaaatttacatggaatgccataaccgatgtttcaagatgtgccatcggttatgacaataaagggaatgcttacgagcctaccaaaaataaaacggcaagtgcagccgatgacttgctcacaacccttgaagattacgggacatttctatgcagcgtgatgaacagtgacggtttgagtcaaaaagtttatgaagacatgacagcacatcaggttcaaactaaaaagaataaatattttggtttaggctttgagatttatgatttagggaatgacgattttgctttgtctcatggcggtgctgacaatggggttcagacgatttttctgttacttccaaaaaccaaacaaggtctgattatttttaccaatgttgatgatggatataaggtttacgaaaaaatccttacccattatatgggtgaaaaagggaagcaaataatcgagattgaaaccaagtaaatctcaattcaaaaaagtgatgtgtacaaaatcattattcggaaatctatggtaaaattatgtattcttattgtgttgttgttaagtaaagttctatttgcataaacctattattggttcaaaagaaatttgttagttatgagcataggcgtatatatagtagttcctggcagttctcggcctatgctctcctgctagagtgttaagaaaaagataaaaaagtattgatcctgaaacataattgaaaattcgtcgtctaaccaaagacaacgacataatcctgaacagattaaagagtttcaatcatcaaatcaaaaatcaatcactgatttactaaccttaatcatcaatcaatatgcagaaaccaatcaaactagttgttcttagtgttattctactgtttttcgctttgaacattacttccgcacaggacaaaggaaaacaaattgaccaattattaagtacctaccatcaatatggccaatttaatggttcggcactggttgccgaaaatggaaaggtaatttttaaaaaaggatttggctcagccaatatggaatgggatattccgaatcagcctaataccaaattcagattaggctcgatcaccaaacaatttaccgcttttttaatcttaaaattagtcgatgacggaaaactaaaactagacgtccctatcactacttacttaccggattaccctaaagaaaccggcgacaaaataacgcttcatcatttactaacacattcttcaggaattccaaattatactgctacaccaaattttcttagagataaaagccgcaatccttatactccggaagactttgtaaaaacatttaataaacttcctctggaatttaaaccgggtgaaaaattcaactacagtaattccggatatttcctcttggggtatattatcgaaaaagttaccggcaaaacctacgaacaatatttgcaggaaactattcttactcctttaaaaatggcaaacacaggctttgatcatagtgaagtgatccttaaaaacagagcagcgggttatgaaaaacaaggcaaaaattttgtcaattcttctttcattgacatgagtatcccatatgccgcgggatctttgtattctactgtcgaagatttatatttatgggatcaggcactttatacgactaaattgctttcagaaaaatctatggagtctctttttaaaccgtatgtaaaagcctggggtgatttttacagttacggatggtttatttcagaggctaataatggcagcaaagataaactgaaagttacggagcacggtggaggaattaacggatttaacacgctcatttcacgcgttcctgccgataaaattctagtggtgttacttaacaatacaggtaatactgttttgggtgaaatgaacactgctattcgtgctattttatacaaccagccttataaacctgccagaaaatcattggcaattgatttattggatattttctctacaaaaggtgtcacagccgggattgatacttataaaaaactaaagaatgatcccacttttgttattaaagaaaacgatatgaacgaagccggctatcaattgctgcaaagcggaaaaaagaaagaagctattgaagtttttaaaattaatgcggagacttttccaaaatctggaaatgtctatgatagtttaggagaggcctatctggctgatggggataaaaagcttgcgattgcaaattattccaaatcagttgaactggatccttccaatgaaaacggaaaaaaggtcttagaagaaatttcaaaaaacaaaacgaaataattcttaacaaacctctttaaaaactccgctaaaattgatttgaaatcaattttagcggagttttttttgttacaatttctaacagtcacattcggcaattaaatattaaaaatactattttagcgctgcccaaaaaaaacaatagtaaaccctcaaatcaacatgatttacaacaagaactgttgtgaactgtttttattaacctatgaaaaaattaaagacacaaactcttttagtactcgtactatgcctgtttattccgcttatcgctagtgctcaaacctcaaccaagaccgtcccgatgcccagtcagcaaaacaaaattatcattgataaaattgtcgaggctgcccattataaaaattatgtgaccgatttttgtctggcaactattagtgaagctgcccttaaagaaaaatggaacgatcaaaaaacgattgaaataacggagagtatcaactacaaaaacttccgggatgctgtttataatatgtttgctttttataatgaaatagaattggaaacacttttaaaaacctatcagaaagatactgtctatcaaacaaccaatgtcatggtcaccaacgatgcactgggttataacctcgaaatatttgcaaatgatattgttcggggaaggtataaataggttctgaggttctgaggttctgaggttctgaggttctgaggttctgaggttctgaggttctgaggttctgaggttctgaggttccaatctttgtcaaagcttacactttgacaaagatgtaatcataaaaacgcaaaagaaactttgcgaaaagactttgctcactttgcggtaaaaccagtaatcctaaaactaaaaaaactatttcccggcaggtacaagtgaaacctgaaacgtgcaacttgaaacctgaaacctgaaactcgaaacctgaaactcgaaaccaaaagcactacttcgcttttggtttcaaaactaatttggtggatgttttaatgatctcttctttgttcagtttcatctttctgaatttaccggcattgtacatctcggcctgatcgtcataatgtttactaaacgggttaccggattgtcctgttggcaaaatactccagctattttcgatatccgagaaatccactactcttctggttgatggcccgccttttacgtgatacttcccttccttattgaatccgaaaaactgattgtttattacttcattcgatcccggagctgcaaatggccctacattaaacaaacggcgcaaagctgctattttccctaaaggatgttcatgttctacggtgtgtgctttaccccagttccaatctgcgacctgatttccaaattgttcctgaagttccgctatggcttcatggaaggatttcgaaacaatatcacttctggtttcttttacatttttggttttgatgttgtcccaccaaacagaattttcattctgaatttgtcttgcaatgatttgtttccccagtgaggtatcaagatacaaactaaagttatcggctcccatctcgtcttcaaaagtatttttcagatacagataaacccatttgttgtaaatcgttggtccaacatcctccgtattattggttcctttccatgattgcaaagcgtttatcgcttctttttcttctgctgaaagcgaacttccggctacagtcgaaattaaacgttgcaccactcccggtgaaaccagtgacgtattatcaaaaatcatcttactgatggcttctttgtcccaatctgattttgcctccattaaacctgaaattcttttggcacgatcctccggcaaataatatcccggatataaaaagccatcgatagcctcaggctgattgttggcagaatacacataaccccattttggattctcggcagaaggattcttcgaaaaatctaaatgttctttaatatcgtctttaccgctggcaccatccaaaataaaaaaggtattcactcctttatcatgtttataaagtgctccggttgcccaccatgccacatttcctttagcatcaccatacatcacattcaaacccggtgccgctacaagcgaaactgcttttctgaaatcgtctttatttttagcatgcgaaagtccataaacggcatctaaaatctggatgggctgttgtgtatacacccacgacattgcaataggattcttttttcctaagcgatccagcacatcattcatgataggcccgtgacggcttgatttaaccgtcagaacaacatctgacgtatcttttacttttatcgtttttttaatcgccgtataagtcgcaaaacctgttggtgtctgatattgattagaatcaccctctttatttttttcctgataaaaatcgatatcatcattctcgaacatcgtcagtccgtaagcataattgcgattgtgcgccaatagcggatacggcgttccggccagataacagccgtacaattcgaaatccggtgttaccaaatgtgcttcataccaggttcctggctgtgaaaagctaatgtgcggatcatttgcaaaaatcacttttccgcttttcgttttagtaggaccggcaacccagctgttacttcccacaaaaggaggaataagcgaattctccagcaatgccgctaccgactttgaaatggtggtatattcttcgatattctcttttgagtttttgatcctggtcgtattaaactctccctcgatccctaaatcttttaaatatgcaacgccgtatttatcacgaataaaagttaacaaaggatctgttttttgcgccattgcaaaactaaaagacatataaccaaaaatattatacacgtcttttatggtaaatttttcttttttcactcctaccagggtaaactcaatcggcgttactccctcttccatgtactgatttatcccgtccagataagccatggtcattttataactctgactgttcggatctaattttgctatggcttttgctgaagcttcttctataccgattccggagaaaaatttatcattttttagtgcaaccgatccaaagatttctgataatcgtccgggtgcaattcttcgaagtaattccatttgccataatcgttcctgcgcatgaacataaccaagtgctgtcatcgcgtctttttcagaatcggcataaatatgaggcactccaaaatcatcaaaatacaccgtggtttctttctggaggtttttgagttgtacttcaccttcgtatttaggcttcagatgaaaaatgtaggcacaaagaccaatcccaagaataacaatcaataccaataaaaccaacagaatttttttaatttttctcatatttatgaaacgtataaggatcaatgtttttgtaatgatgtcccttaaatttaaaatactttaagaaacatcgcttttaaaagtctaaatttatgtatttaaaatcaactatgtttgggagtggttttttgtttcacgcagattttacagattttttttgctccttttataataggcgtctttttgatcgcagtaaaatcttttaaaaattaatggattaactttctactttaaaataacattccgaatgcagttgaagaataacaaactgcaaacctgatatttatcaggttttttgaattttattttcccaacctttgcttttattttaatttaaaaacaaatggcaaaaccatcgatacacactttccatatccctgtaatgggtctcgcatatacaatcgacagtccaattcgagtggcacaatttggtatttcatctgtagtttctatcgctgatgatgatctaattgagaagatgcgtaatttttacagtactaaatttaattttccctacgaggagatcagtcaaaaatttcaggactacagggcacagcgcattacctcgtatctcaatttggtcgataaaattgtgaaagagaaatttgaaaattttaaaacggaattaatcgaaagtaagactgcggtagaaaattatattacaatgttaccgaatacttccgacatcaaaaaggggtttcagaatttattggaggacgggatttcttttaaggaaaacattcaaaactatatcgaatctcatctttcacccggttgtattgacgtgaacattatgaccaaaatcgacaaagataattttgaaaaaaacgaacagcttcccattgaatttaatgatgctcatgccgctttgcgaggtttcgctaatagtgatcttgaatcttcagtggtactttctgccggaatgaatccaagattgtacagctatttcgaaaattttacggatttctttcccaatagtaaaaacgaacttaaaaagagaattattctaaaagtcagcgatttcagatcggctatgatacagggaaattttctagccaaaaaaggcctgtgggtttctgaataccgcatagaatcaggactaaactgcggcggacatgcttttgccactgaaggccttttactaggtccgattttagaagaattcaaacagaaaaagaatcagctcattcagtctgcacatgaattgatgacaaaagtattacagcaaaaacaagttcatgtccctgaagtaccattgcctttgaaaattacggttcagggaggcgtaggtactgccgaagaacacgattttttattgcaaaattacgaagtagactctgtaggatggggatcaccttttttactggttcccgaagcgacttctgtagacccggcgactcgcaaattattaatggatgccaaagaaaaagacttgtatctgagccacatttctccattaggagttccgtttaatactttaaaaggcactacaaatgaggctttaaagcaaaaaagaatcgagcaaaataaagcaggaagttcctgcccgaaaaaattcctggccttgagtaaggaatatgatccacatggaatttgtacagcgtcgaaaaaattccaggacattaaactggaagaattggctgctaaaaaaaatagtctttcgaaggaagcttatgagagagaacagttttcgatcaccgaaaaagcctgtttatgtgtcggattggccaatgcgtcctatttagaaaatgatatccagataaaaggtcaggcacagggagttgttatctgtccgggccctaatatggcctattttgaccaagaagtttctttgtctgatatgctggcacatatttatgggaataattccatcctgagggctaataacaggcctaatctgtttgtaaaggaattaaaaatgtatatcgactattttaggaatgaaataaataatatttcgggagaaatcaccaatgcccaattaaagaaatggactgtttttaaagctaatctcttagaaggaattgcctattatgaaaatttgtttgcgtcttctttctattttcaggaagatcccgaaaaaatcaaataccaattcgatttttacaaactggaactggctacaattcaagttccaacttgtgagttggtataaagaaaccgccgatttaaaatttaaatcggcggttttattttaaaactgtttttccagtttactcttttttctttttgctgccatcgataatagctccggttccggctccaacacctgctccggctaaaccgcctattattgcaccttccccttttctcttgctaacaatggctcctgtcactgctcctactccggcacctattacagctcctttggctgctgaactccagcctttctttttgggagtggtttgtgttgcagtcgaggttccgtcagctttgtgattgaccactactactttttgtgtttctaacttttgttgtgcctctaccttttgctcttctctgatttttgccatttccgttctcattgaatcaataactctttgtttactaatttcaactttcatcgaatcaatactagcttgttttgctttattgatatcctcttttccttgattctggcaagaaacaagaaaaaccgcagctataaaaatatataaagctttcatgagattgtagtttaaaaaattattacactacaaagtaaagaagaacttttttctgaaagcttacaggattttgcagaaaacttatagaatttgaaggttctgttccgccacagcttataaagattataatgattttaaaaaactacttccatctatttgaatctgcatgggattatactttgacttatgctcctaaaattccttttttaagaatctgaccaaaatcatacatgtcttcatacgaacaatacaatggaacgggtgccagacggattacattgggttcacgccaatctgttatcacgccatttttcatcaggtaatcaaataagctccttccttctccatgtagaaaaacagaaagctgagaagctctttcactaagatttgaaggtgttataatctcaaaattgccttttacctctttatcaatttcctgtagtataaactctaaataagcggtaattttatctctttttacgatcagggtatccattccaacctcagcaaacatttcaacggaagccaaataaggtgctaaggtaagtattggtaaattactaatttgccaaccgtctgctccatgaaccggatcaaaattaggctccattttaaaacgacgttccttgttatgcccccaccatccggcaaatcttggtaagtccggattgttgtgatgtttttcatgtacaaaacagcctgaagcattccccggtcctgagttcatatatttataactgcaccaggcagcaaaatctacattccaatcgtgaagttccagtttaatgtttccggctgcatgtgccagatcccagcccacttttgctcctgctttttgacctgcggcagtaattgttttcatatcgaaaacctgcccggtataataatttactcctcctattaacactaaagccaattcctctccgacttcttcgattttggccaaaatatcttcaagacgaatattatgttctccttcacggcgtttaatttctacaatcgcatcttctgttttataaccatgaaaatgtacctgactctgaaacatatattgatctgaaggaaatgctttttcctcacagatgattttgtaacgggttgctgttggctgataaaaagaaaccattaacaaatgaagatttacagtcaaagtattcattaccgttacttcagaaggtaaagctcccactattttactcaggggttcggcgaatcttccctgataatcccaccatggtttttcggcataaaagtgaccttctacggcaagatctgcccaatcgttcattacttcatcaatataagctttggtacgttttggctgtaatcctaaagaatttccggtgaaataaatcacttttttatcattaacttttggaaatataaattggtcctgatagtgatttaagatgtcctctgaatcgagttgtttcgcgaattcgcgtgtattttgaaaagtcattgcgtttgttttgaatcgtaaaaataacaaaaattgtttattttgtttcaagtttcaggtttcaagttaccaacagaacctaaaacctgaaacttgaaacttgaaacctgaaacctgaaacctgaaacttgaaacatgaaacctgaaacatgaaacttgaaacttgaaacctgaaacttgaaacttgaaacttgaaacttgaaacctgaaacctgaaacttaaaaccattataaaatagaaaacccgacaagtttaaaaacctgtcgggtctgtctataagataaattctaattaaagaattaacattgcatctccgtaagaatagaatttgtattcttctttgatcgcttcttcgtaagctcttttcattaaatcatgaccacagaaagcagaaatcatcattaataatgttgattttggcgtgtggaagtttgtaatcatacaattggcaatactaaaatcgtgaggagggaaaataaatttattggtccagccttcataagggtttaaagtattttgagaggaaactgaactttcgatggcacgcattgaagttgttccaacagcacagatacgttttctacctgcttttgcagcatttacgatatcacaagcttcttgtctgatgatcaattcttcagaatccattttgtgtttggacaaatcttcaacctcaaccgggttaaaagttcctaaacctacgtgaagtgttacttctgcaaaatttactcctttaatttctaatttcttcaaaaggtgtttcgagaagtgtaaacctgccgttggtgccgctacagctccttcttcttttgcataaatggtctggtatctttcagcatcttcagccgttacttctctgttgatgtatttaggaatcggagtttctccaagttctgtcaatttatttctgaattcttcgtaagatccatcgtataagaaacgtaaagttctaccacgtgaagtggtgttgtcgattacctcagccactaacgaatcgtcgtcgccaaaataaagcttgttaccaattctgattttacgggccggatcaaccaaaacgtcccatagacgctgctctgagtttaattctcttaataaaaaaacttcaattcttgctcctgttttttctttgtttccgtacaaacgtgccggaaaaactttagtattgttaaggatcaaaacgtctccgtcatcaaaataattgataacatctttgaacattttgtgctctatagtttgtttttgacgatcaattaccattaaacgagactcgtctctattctctgctggaaattccgctaaaagttcttttggtaagttgaattgaaaatgtgataatttcatattgacattgctgattttagagtgtagattttagatttttttatctaaaattgtaaatcgtgtgcaaatatacgattgtgagataggcgttgtcaagtgttttgctgtttattttcaaaagcctttggtttactgccccttagagttccttaaaaatgaaagttttagcttttttttaactttagaggaaaccaaagttcatttaatccgaactcctgaaaaattgctgttgcttttcctgatcaaaatcaaaaataaatccacaaaaaaacctccggtttgaatcggaggttattgaactatgttcagctcttaaacgagcttctattttttatagtgtttcgacaatttcaaagtctaatgctttcaaatcattccagaaatcagggtacgattttgaaactactcccgcatcttcaataacaattggtacttttaaagccaagggtgcaaatgccattgccatgcggtggtcattgtaggttgcaatcttcacattgtgcttaatattttctgatgccaccaaagtcaaactgtcattggttactgaaatggcagctcctaattttgtaagctcaactcgtaatgcttccaatcggtctgtttctttaatttttaaagtatgaagacctgttaaatgacatcctatacctaatcccagacaagtcacaacaatcgtttgcgcaatatccggagtattgttcaattcaaaatttacattttcaaacttaaaattctcttgttttaccaaagtcatttgattgttctgaaaagtagttttcactcctaatttttcataaagtgataccaattcagaatctccttgtaagctgttttctttgtaactgctcaacgttatagaagcagtatctgccaaagctactaaactaaagaagtacgaagccgaactccaatccgattctactaccatttctttagaagcgacttctgtttttggatatactttaatcacattaccttcaaaactggtctgaatatctaaatcgtttagcaaagccaaagtcattttgatgtatggaaccgaagtgatttcaccttctaaagtcaattctaagccattctccagttttggtgccactaataaaagtgccgaaatgtactgactgctcacgttggctgccaaagttacttttgaagcggttactttttttcctttgattcgaattggcggataaccctcttctttttcataggaaatctcgactcccaattgttctaaagcttctaccagaatctttattgggcgctcctgcattctgctggaaccagtcatgactacttcgcgtccttcgtttactgcaaaataggctgttaaaaaacgcatcgccgttcccgcatgatgaatgtctatgatttcgtcatggccaattagtgctttttgcattacctcactgtcatcggagttggaagtattggctaaagtaatatttgggaacagtgcttttaataacaacaaacgattggtttcgctttttgatccggttactgcaatttgtccttgtaaattatgttgagtggtttggagtagtaaattcattatagggtaaatattatagcatttttgcaaatctattttaaataaaggacactccaaaactttaccgggacttatcacattattttaatttatcgttgtttttatgacgatccttgtcccgaactgatttcaaatccatttttttatcaaaagcagcttgtaaatctattccggtttgattggccagacaaagtactacaaaaacaacatcggccagttcttctcctaaatctttatttttatcgctttctttctctgactgttctccatacctgcgggcaataatacgggcaacttcacctacttcttcggtaagctgtgccatattggttaattcgttaaaataacgaacgccgtgttctttaatccaggtatctacatccagttgtgcatttttcaaatccatagttctatttttcaacaaaaataattctaatcttttaataccgctagattctctttaaaacaattttctctgtttctttagcgatcatccctttgtaatattcttttagcatttcatatttttcagtagatacaattgcatcattaatctggtgctgcactgtgatttgtaaaagattatcgtttgctgcaatgttaaacttaaaagttcctaaattctcttccatattgaaaattgctggtgcaggtagtgtttctactgcgaatccttcaggaattttaagcgtaatattgtatttatcagtaaacgggaaaccaaaatctaccggatattctctcacttcctgtttgaatgggttttccttatttgcaaaaaacaacatagggctcacatatattttaccaccaattacttcacataaattattccctgtaaaagagtacgattcaacaataggcaatagaatatccttttcattggttttggagtactcactaatttcaattttattgttttggttttccaatttttccagatattcctcttctttgagactagaaatattatgtctggtgatcacagcattgtaatccgtacattgtcttctggtttttcctgtgattttaccatcaggatcaacgctataattcataaacacaatgtcattcgacgattttttaggcatcaaatctacttcttcagaacttccgtcttttcgaatcaatcgaccgtaccagtttagagctctaaatggtaaaacattaggggttgaatacttatctgaagcatctaaaaggatattcccctctggtgtttcaactgccgcaataacataattaaaagcagttctgtttggaaaaagagaaatcccgttagaacgtgtactcactaaaaccggatttgcggttaatcctgcgtagcgcaacatagcagttaacatcaaattaatatcggcaatgtttcctgacttttctttataggctttcttaacaccactgtcacaattgtacccgttatagtcattccactttacattagcctttacgtaatttaaaatggttaaaattttgtcctccggagtgttttttcctgccagtattgcctttaaatcttcttcaaaatatccagttttatttaattcaggaccaaaatcatcatattcgtaaatggttttgaccacagaattccaatctgtcgaatacatttttaattgtgcatttagatgttttgtcattgataattcatgctgaatgctggatacgtaattatcaatattatttacaaaagcttcctctttcatagccggaaaatcttttgctacataagttgttcttgtttcagtgtaattaattttatctgtagaaaatgttgtcgtactgttcatcccttcacttctttctttacttgtgagagtaatcgtctttaaacctttttctactgttagtttaggaaagatatatcctttctgtcttgaattaaagacataatactccggaatataggtgctaaactcggaataattcacaggaatactgttttgaaattcccactccctgataagtcgatcactcggacatcttaaaacatatcgaaattcaataacagaaccttctttaacattaggcattgtaatctttttttgtgacctgtatttattgactacttcatcaaacactccatcgctcttcagttttgtcttttcgattttccctccaaccaaattgtaagtaacagcatcactaaatgttaccttttctttaaagccactctcattaccgtaccatactttttgattagcccactcgtatcctgcctttttataaattttaattctgatttcaacttctgtaacggtaataaaaccttcatttgaatcatactgtatactggcattcccttttttatacagaatagcagctactgctgatgaatctttagggtgtactttttcctctagttctgcaacagatactttccctaatttaaactcttgtgctgaaactttaaacatgcccagcagcacaattaaaaaacttaaaaatttgattggtttcattttggttagttcttggttaatataattttggcattatcatttttggctatctgctccataaaaagacgatagtcatcgtattctttgttggagtatttccctttatttaaaaacagcgaacgtttgtagagtaatttattattctcttttttgataatttcggttttgtatgctccgaactttccatttaattcgaaatttgagggcaaaaattcaatcgcaaaacctgcaggtaaactaacctcaatttcatcagtatctaaatacccgcgctgaatttgaaatgaattttttctgtttcggattctctttacgttcgtggcactttgattaaatgcatcaacagcaaaaattagtttattccctgagactgttgcataatttaaagcactaagctggacatcttcggtaaaacgtatcgcctctttgttattagtcaaagccattttacccaatttcaggttgttgatattgtcccaatattctttgtagtgggcttctttttcggttggctgtaaatgctcaatccgtgttttcgaagcgtattgagaaccttctgaatgtattaaaacggaaccggaaaaatgtccgttttcatctattgtataagtacctttttcattttgagtgttgccttcatctgcatacacttttgttcgcacaatttcaccaccctcaggtttaataactaatacatctctgtcatccgtaaaagttccctgatacccgaaaggattgtcctgactcgtacattctaaccaagtataactatcacctgtgggaattgctaaaataatatggtttccttgttgagatacaaaatctgatctaatatccattttatatgagtcgccatacagttttgtataataagattctacacctacgcatttcaataatgctttagtataattagtcaaagccttacagtcaccatagcctaatcgatcaacatctttagcaagcattggtttccaacctcctattccctcatgaatagcaacatacctaactttttgttgaagatacttataaattatttttgctatctcaatggcatctttctcattcccaaccaaagctttcatttttactttcgtttcctctggaatatcttcagtaccaaataaaattttatctccccaccatttaccaaattctttccaagtcttggcgttcccatcaaccccttcaagattaaaatattcaagtcccattaaaagactaggatatatttcattaaaactcgggctataatcttctgatttttgtgccaaaatagctgctgcaacgtacgaaagttgagtctcactgtcgacgatcttttttatattaaaatctaaaaattgatattcttttttcctaaaacctaagctagctggatatttaatgttcaaaacattcttttcaacactaatataatatccctctaatggcatccacgttggaataaaagcagttgtagaagtttgtgtttcactattataaactacagtgtatgggtacgaaattggggtatattctaaaaaaagatatctattatcagaaataagtgtaccgccatcaactgcgctttgatctttaaaatcttttcttttgactttttttatttcatttccaaaagcgtcataaataatagcttcaatactattaactgacgaatttttaccataatcttcataagcatttaccgcattcgaacctttttcatttagtaccgtaacgattcgttgcgtttttatagtcatactacgttgcgaagaaattgtaatatcagtctgatttagacgaactactgcattggcattttctttaagactgtcggcaattgcagccacagcatattcgcttttttgagcggaagaaataagggtaaacaggcaaaaaaataacgtaacaaccaggcttctcatttagtaagtaatttcgccaaatatatattatttttagaaatccttaacatttgtctaatatttttttaatctctgtttttgctgtctattaaaatagttacgggtccgtcatttaccaggctaactttcatatcggcaccgaaaattcctgcctgtatttttttagtgaattctttttctagggattttagaaaattctcatacatgggtattgcgaagtctggttttgctgcttttatataagaaggacgattcccttttttggtagaagcatgaagtgtaaactgactcactacgataatatctccgtcgatatcctgaattgaacagttcataacgtcattctcatctccaaaaattctcattttgacaatcttacccaccagccaatcaatatcttcctgcgtatcggcttcttctattcccactaaaaccaataaacctttctgaatatctgcaacttttttctgatcgattgttacggatgcttctgaaactctttgcagtactattctcatttatgtaagtcttaaagttgaaagtcaaaaagtgtaaaaaagccctttcgaaactttttaaacatcgcccttttaactgaatttattttctcgtttcatcactcgctgcacgatcatcaccataagtatccgtgcggtaatgctcttcgtctccttccaaaattttgaggtaactgttatagcgggaccaggcgatttcatctttttccaaagcggctttaatggcacagtgtggttcttctttatgtaaacagttgttaaacttgcactgatcttttaatcggaagaattccggaaaataaccgcttatttctgaaggttccatatcaacaattccgaaaccttttattcccggagtatcgataatctgcgcattaaaagacagatcgtacatttcggcaaaagtagtggtgtgctgtccttgtttgctttgttctgaaattacagtagttttaagatgcaaacttggctccatcgcattgaccaatgtcgattttccaacaccggaatgcccggaaaacatactcactctacccaccatcatttcttttagtttatccacacctttattctctgtagaagaaatacgcaggcacttatatcctatttcctgataaatgtgctgcaggtaaagctgttcatccaaagtactttcatccaaagtatcgattttattaaaaatcaaaacagcctcaattccatacgcttcggctgtaactaaaaaacgatctatgaaactcgttgttgttggcggattattaatcgtaatcagtaaaaaaacctgatctatattggatgcaatgatatgaatctgtttggataaattaaccgatttacgaacgatatagttttttctttcgtgaatattaaaaatcgttccggttaccgcatctgaagtttgctccaattcataatcaacaatatcacctacagcaattggattggtactcttaatacccttcatcctaaacttccctttcatacggcattctataaaatcacccttttctgattttacagtgtaccaacttcctgtagatttatatacgagtcctgtcattctttaattttagattgctgattttagattctagattatgctttgaaccaaaaaataaaaggcaaaattacgtttttagaattgaacaacgcaacttcaccttttaaaaataaagacttactcttaaattgaaagatttaccagataatttcggctaaaatttcattttctttgattttccctaactgaatcgtttttaaagttctggacgtttttcccgctcttgtaatataaatttcgaccattaatgttgccggaccattttcagttaattcagtttctccaaaataatcggttttaattttatatttcccctttattgcatttcgaattatatattgctccggcccataaccttctgtaaaatctttagaaaatcttcctccaatttgtgtagaagtatggctgtaataacattcttcatttgttggctcaattacatgtaaatccaaatcaacatccatttggttccagttcataataactctaatatcaaccggcatttttgcaaggtactttttatcaagcttacccgtttttatgccagaatgttctgttatcattcgattaacatccattagaataatatcctctacaccttcatactggccactcatttctccataataattcacttcaagcgctttaattaattgatcaaaagcttcttgatattttcctgcatcttctagtgttaacgcataatctctgagactctgtggttcatgctctctccatttcacgacttgttttgcagtaaatactgcatcattataatctttccactgacgcaaagtataagtcaaagttttataaagctggtgattctctaaccctaaatcagcaatattactaaggatcagcaacgctttttttacatcgccatgaatgtagaaaaaatgagccacatcaaaataaaaactggggttcctttcctgtgcttttcgtaattcaaagtacaaatcatattgtttttcttttggagctgaggccaatgcttttaaatacaatcgatctggattccaactttttgtttctacaactccactattccaagagtcctttttcgttgttacaataataactccatttgccccactgctaccatatgcagaaattctcgacggatctttcaacacctctaccgaagcgatatcatctgactttaaatcggttaattcaccctcataaaactgaccatcaacaataattaaaggcttttttgaatctccggctaaataacctccattaaaatttgaatcttctgaaagatctttattttttgaagtgcctttttcaagagcacctgttaaatctggttttttttgagtaccataccctactacaactgtttcttgtaattctgcgctgtttgaaactttattaatttcttcgcttcctacttttttatcttttatctcagtaatttttggtatatccccagtaacttcttccgcttttgctaacactggcgcaacaaatttaacctgatctacttttggtgcagaagcagtattatatacattgttgtcttcaattactgtcgcagctgttcctgcgccaacaggttcatctacggtcaagactgcatcaggatctccttttatagtctcttgataaactgtgccctcatctctacctaaaccaggcggcggaagttgtcttttgtatttatacttagacgcaattttctgccctttgtattgaacattctttttccaccaaatatttaattccttaaaataattttcaatactttcccaattatttttttgctgcgccagtgtagcatcatgttcctgttttttaattcggtcaaattcggcacgcaattctgctggcggcataatatcataagaaatataatcgcgaatatcttccagaacaattaatgaagtattctttgttatgattccgtatttcttgcccagaagctcgatttcatctgcatttttgtcatattgaaaatcgaggttggcaatttttttctgcgcccaaagtttttcaatatttacttctttggtatcttgaatagtagcttcaagcgtaatttttcgttccaaaactacttggtttccgtaaccaaaaagaagtgtaatctcatttttcggattcaaagaaatccccgaaaaactaaaatttcccgaaaccgaagtcccttctatcggaaatacatcagttaccgttaaattctcctttattccaagaaactttaaattagtatttaccaatttatctaaagcagcttcagcatttatctgatttaaattgatgaagtttccgccggttttcattgaagaaaagttgagaaaagcaaaatctgaagaaactgaagagctaattatgtaagcaggtctcttcgttttgggtaaaagattttcactcaaagaagataatccatctgtgaaaaataaaaattcatcctggttttcaaaactgatttgtgaaaaacgagttccgccatcgtattttgtgttctctaaaactgtttttaattcggaccaatttccatcagaaactacaaactcttttcgtttttcgaaagtataattcaaaaagtacaaggtaacttttgtgttttgtattttctggaaataagcatttaacaaatccagttccttttttaaatctctgttctgacagctaagcgagttatcccaaattaaaccaatcgaagccggtgtctttttcgctgttttattcccttctacaaaagtattcccgtaaaaataatgttggcctccaacatcctgcatcaatacacttggaagattttgctgtaatggaattttaaaaactattttttctgcaggctgatagttttcttttttgatcgaagcctgaaaagattggttccattttgaaaaagtaatctcatttcctgaattctcagtaactgttggtgccgttgaagctcctaaaactgatacattaatttcaaactggtctgttttttttggaaaacgactcatcaattgatacaccagattgtctttatcaaaagccgaaagttcttcttcgtaaccaataatcacggttcgttctccatttggcagtaacggataaattctggttctaaaattatttccatctactttctccagtaatcccgggtcaacacgacgatgttcaatcgcttcaaaaacctgtttccctttatttttattaaccggaactgcttcgcgtatttttccgctaatatcaatagcatatctggaaaccgaaacattttccggtaacggaaaaataagttctgcctccatctgacgggttcctgaattaaaaaagtgcatttcgacagtagtataagcaatgtttcctaccacttttacattgacgaaaagtttgttcattctcactttttcagcatcctctcctttaaccgttagttcaggactttgtgcgaaactttctattccaataagcaaaaagaagaaaaacaatacatgcaaattcatccgaaaaatgcccggcacagacgaaaacaattttgacttcatgatacgaaaatttaggtttatacttttatagagaacaaaaaacatcaaaaggttgggaagatactatttatttcaaaaaaaaatctccaaagcccaaaagcaaaggagatttaatataaaaaaacaatctgtttttaaaattgtgacataagaaaatcgtagaacaacgtttaaaaagcttcaattcacttatatcacttatgcgtttagaaaaaattatgcattgaaaactttttcctgatgaccaatactttcctggtgaattgctttaaacattctcaaaacaaattcttcggtaagtccttttttctctccttccagaatcatttttcctaagatttcattccaacgattgttttgaagaatcgcaacgtttgcatcttttttcacctgtccaatttcatcagcaactttcatacgttttccaagcaactctaataagttagcatccaaaacgtcaatgtttgctcttaatttcttcattttttggttgtactcgtctgtagtatcatctgtttttctgatggtcaaatcttttatgatttgtttcaaagcatccggagttacttgttgagcggcatcactccaggcattgtccggatcgtaatgcgtttcgataatcataccatcgtaattcaaatccaaagcttcctgagtcacttcgaaaatcatgttacggtttcctgtaatatgagacggatcgatgattaatggtaaatcagggaatttattttgcaattcgattgcaatttgccattccggaatgtttctgtattttgttttttcgtaagtcgaaaatcctctgtgaatcacccctaatttttcgattccggccatgtgcaaacgctctacaccacctaaccataaagctaaatcagggtttaccgggtttttaaccaaaacgattttatctgttcctttcaaagtatctgcaatttcctgaactgcaaaagggtttgccgttgtgcgggcacccacccataaaacgtcgatatcgtgttctaaagccaatttacagtgtgctgcagttgctacttcagttcccattaataaaccggtttcagctttcgctttttgtaaccatttcaaaccaatttctccaacaccttcaaatcctcccggacgcgttcttggtttccagatccccgctctgaatacgctaacttttgaatctttcaactcacgtgcaatcttcaatacctgatcttctgtttctgcgctgcatggtcctgctatcacaagtgggtgatttaaattgaaatcttctaaccactttctcatttctttcttattttccatctttgttatagtttattttttaattgttaatccgtttagtatttctttaattttattggtgctttccatttcttcaaaaatggcgctataatcttcttctttcagcaaatccctaaaccgactgagatttgaaatgtatgcttctaaagtttcgagaacgtattctttattctgctcaaaaatgggtgtccacatcgcgggagaacttttggccagacgcactgtactttcaaatccgcttcccgccatatcaaaaatatcctgttcgtctttttctttgttcattaccgttttcccaagcataaatgagctgatgtgagataaatgcgacacataagcaatatgtttgtcgtgcgaaaccggatccatgtatcgaatcctcattcctatttcgctgaaaagcttcaatgccttttcctgcaatttaaaagtggttttttccacctcacaaataatattcgttttccctttaaacaaccctcttatcgccgccgaaggccctgagaactctgtacctgcaattggatgtgtagcaataaaatttcttcgtttcggatgactcgctactgcatcgcaaattggttttttagtcgacccaacttcaaaaacaattgttttgtctcccactaaatccaatacttttggtaaaaccgttagcgccacatctacaggaaccgaaacaattacaaaatcagctcctgacaaatcttcaaaatgtccttcctgatcaataactcctaaatcaattgcttcctgcaggtgtttttcgttactgtcaattccaaaaacagctgcatttggatgttggtccttgatgtccaacaccatcgaaccgccaattaatcctattcctattacgtatattttcatactatttttttaatttccaatttttgatcttatttgtctccctgaacgaagtcgaaggtcgctccaattagaacgtgggcttcgacttcactaagcctgacatctggataaaaatcttgattcttgattctaaaatcttaatccctaaaatcgctctattgcttcttgtactttttcttcttttacacacaatgagaatctgatgtatccttcaccgttgcttccgaaaatagttcccggcgtgataaaaatgtgtttctcgtataatatttcatcaataaacttctctgctgacgctattccttccggaagttttgcccagacaaataaacctacaccttctttataaacttcgcagcctaatttctctgctaatttttccgttaattctctacgacgtctgtaaattacattctgatcatagaaccaacttttatcacaatttaaagctgctacagcgcctttctgaattccgtaaaacataccgctgtccatattgctttttactttcaaaacagcatcaataatttcaggtttccctaaaaccatccccactctccagccggccatattaaatgttttactcaatgaattcaattctaaagctacatcctttgcgccttcaacctgcagcaaactcattggattatcattcaaaacaaaactatacggattatcgttaaccaatagtatgttgtgttttttagcaaaagcaaccagtttttcaaataacgtcaagcttcctcttgcacccgtaggcatgtgaggataacccagccacatcagttttactttctccagctctaatttctctaaagcttcaaaatcaggttcccaggagttagcctctttcaaatcataataaaccggaactgctccaaccaaattggttaccgaagtataagttgggtaacccggattcggaattaaaacctgatcgccttcatttaaaaatgctaacgaaatgtgcataattccttctttcgaacccatcaacggtaaaatctcattgttcggattcaacacaacaccaaactgattctgataaaaatcagccattccttttctcaattccggcaatccctgatagctttgatagccatgcccgttttcctcctgaattgctgtggctaccgcttcaattactgctttagacggactcaaatcagggcttccgatgcccatattgatgataggtttcccttcagattgcagttgacgaacttctctcaattttgaggagaagtagtattcttcaactgtatctaatcgttttgctgttgtgatcatttttttgggttttaggctttaagctgtatgctttaagctcatttaaactttttaatttgttgtattattctttttaactttatgattttcaacttttcaacttttcaactttaagactcacttaaaggttttgtgtttttgtattctcccaatactttaaaatattctgccataatgtttaataacgatttggcttttgcaaaatcctcgtatttctcaaaggttacgtctacaaaaaacgcatatttccaaggtgtttcaatttttggaagcgactgaattttcgtcaaattcaatttgcagtcactcattacatttaaaaccgctgccagactgcctctcttatgatccagttcaaatttaattgaggctctgttgatttcattttccggcaaaaatgaattctgctttttaatgattacaaagcgggtcatattgtttttgatggtttggatttcaggagcgataatttctaaattgtacatttctgaagccgttttacttgcgatcgctgcgattccggtcaattgtttttcctgaattcttcttgctgtttcggccgtatctttatcctcaaccaatttaatatttggatattgtttcaaaaaatccatacactgcaataaggccatcggatgcgaatgaacctcttttatgtcctcaattttctgaccttttaaagccattaaattttggtgaatattcaaataatgctctccgataatgtgaatattattcttatcaatcaaggcataatttggaataattggtcccgcaatcgaattttcgatagccattactccctgctctgattttccggaaagcagactgtcaattaattcttcaaaagataaacactcatcaatatccacgttttcagagaaatactccttcactacctgatggtgaaaagatcctttaataccttgtattgcaattttcgttgtcatatattcaaaaaaaaatcctgatttgcatcaggattgtatattagttttatttgtcttttaattttctcaaataaccatagcacaatccttacttctactaaagaagaaataaaaagagttgctaaaataaaaacggttattagtcattttgtttgtgtttttcaataaatactctgcgaatgtataaattatttttaccgcaccaaaaaaaataatactttttatgaaacaaaaaaggatttcttaacaaatttatgatgttttgtaagataatataaaaatatctttagcaataaactatacttttgtaagaaatcaaatagttatgattccttatatgcgctacaatcttaattttttattactctttactgctctcttatgtgcacaaaatcctaaaaaagccacagtaggactttcttacaaagaacttaaagacacattttggaataacgaaggaaataaaaaaaagcagttcgagtatgctaatgctttttataacaaagcaaaaagcgaaaataatcccattgaaaaagcaagaggtgcttatttgatttcattaatatcaactaacgaagtagcaataaaatatttagacagctccatttcatacagcaaaaatttaaacgattcaaagtatcctgcttatgcttattccagcaaagcctatgtattaaagtctcagtcaaaatataaagaagctatcgataattttttgattgctgaacgtattgccaaaagaaataatcctgatttttattataaagtaaagttttcgatagcggttttgagatctgaagaattaggtgaaataaccgaagctctaaaactatacaaagaatgttttaattattataaagaaaaagaggtacgagatccaaaatactcctactcctatcaggatgttttatttgcattagctgatgcattcaaagccttgaaacaatcagattcagcaacttactataataaattaggatatcgggaatcaaaactcaccaaagattatgggtataatgccctttttgtgttaaatgaaggggctaattttgtagaaaagaaaatatacaaaacagctatagacagtatcaataaagctttaccacaagtaatttacgataaagacacaggaaacactttagcggcttattattatttaggtaaggcctatgatgggttaggaaaaaaggagctggccgttgaaaattttgtaaaagtagattccatttatgacaaaacaaaaaaaattacgccagagtttacaagtgggtatctttatttgatttcttactttaaaaacaaaaaagataaagaaaatcaattaaagtaccttacacaatacatgcatattgacagtgttctacaaaccaattataaagaactcactaaaaaactgcaaaaagaatacgatactcccaatttaattttagaaaaagagaacctgatacgatcacttaccaacgatcagaccaaatcgtattggagtattggtttattatttctattggtaattatcgcaataagttttggagcctatcagtatcgtatcaaaaagagacagtcctctcaatttgaaaaaataatggccaaatcaactgataatgagatacaaaccgttgaaatgaataaaaaagaaatcaatacagctaaatccggagtcgaaaatattggcatcaatgaagaactagttgaacagatattaaaaaagctaactcactttgaactaaccaaaggatacttattatcaaacattaccgttcagtccttatctgatacttttgaaacgaatagtaaatacgtatctaaagtagtcaatacctataaggaaaaaacttttatacaatatattaatgatctaagaatcgaacatgctttagaatctttaaaagaagatcctaaattacagaaatacaccattcaggcattagctattgagttcggttttaataatgcggaatcattttcaactgcgttttataaaaaaaccggcatcaaaccggtttactttatcaaacaattagaagaattaagaaaaaacacaactacttattaatcaatattaatcagtagatttaatatcgaaattcctgaatttcgataaatagttttttgtattagacattatcttttctgacaaaatttatatttgcagtacaactattaaaaagagcaaaaatgaaaattgagacaactaaaaaagatagtaaaaaattcgatttagaaaaaatggaatttgcaaaattaaagaatatgtatttgattattggcgggggtgacgatccagatacaggtacaggaactagtcgtcgttgcgatcctaaaaaaaagcaagattaaccaaactcataatgaaatatatatatatcatctgttctctttttcttatattatctggatgtaaaccttcaaaaattacgatcaattcgaaaaaaccaaaagattcgaaagaaacttggtacaccaaagattataaaatagatactgtacctggaatttcgctagataaatggtacattcaaaataaaaagaaacctaaaaatacagttatcgttgctgtaattgatacacagattgacaagaatcatgaggatttgaaagaaaaaatttggacaaatacaaaagaaatacccgacaataaccttgacgacgaccataatggattcgtagacgatacgcaggggtggaattttgctgcaaaaaaagacagttatgttgtttggggaaattttgaatatatcaggttaataagagaatttaaaaacaagttcgaaaataagacagaaaacagcatttcaaaaagtgacttatctgattataaagaatattttcgggcgaaaaaaaagttggaagaagaattgagttattatcaaaatagattaaaatctttagaatatagtactaaaatttttcccgttgcgaaagacagcttgaaacactattttccaaaagaggattatacttttgaacaactggacagtttgtacaagatttataaaataaatgataaaacctttcgccagcgaagagaaaatgatgaccgagatctgggagcaatgattggttttctgatgtttagactggagtcatatgaaactacattatccgaggttatcgagagtaaaatacaaaccgattccattgttaataaaaatctgaatatcaattttgatgaaagaaagtttattggagacaatccaaacatattagataaaggctatggtagcaagtatataagcatttctaaagcaggacacagatcttttcaggatcataatacaaaagtttcagggattattgccgctgacagaaacaacaatctgggaattaaagggattgcagaaaatgtaaaaattatgccacttactatttcttattcgggagatgaacacgataaagatattgcaatggctatctattatgctgttgacaatggtgcaaaagtgataaatatgtcttttataaaagaattttcgttaaggcaaaaatgggtcactgaagcttttaaatatgctgaaaaacataatgttttactggtacatattgccggaaatgacgcttctgatgttgataaaaatcctgcttatcctagtgatgttaattttgatggcacgcctgaaatttgtcataacttcattaatgtaggctccacaacaaataagttaaatgagaattttgtttctgttttttctaattacggtaagtataatgttgatctctttgctcccggaaacgaaatttacaccactgcagctggcaatacctataaatttgattcagggacttcattagcagctccaatggtttcaggaacagcagcacttatgtggtcctattatcctaaacttactgctgctgaggtaaaacaaattatactagattcgggaacggcttatgatatcgaagttattgttcctggtacagaagacaaaaaacttcctttttcacaattgtctaaatcaggtaaggttttaaatgtttacaatgctatgaaacttgctgaaaaaatcagtaaaaacaaaaaatgaagaaaaagcaaattgctagtgagggaacattagtaaaagtatacctttttttgggtttactattatttttaattggctgtaaaagcaaacaaaatttaagtgcttctacaattaattctattagaacagaattaacatcttcagaacttaaaaactggtatcaaaaagattatgctttagatggagttcccggaatttcactagataaatggtacaatcaaaataagaagaatcctaaaaatacaattatcgttgctgtaattgatacacagattgataaaaatcatgaggatttaaaagataaaatttggtttaatacaaaagaaattccagacaatggaatagatgacgaccataatggatacgttgatgatgtaaacggttggaattttacctcaaataaaaatggggattatattgtttggggaaattttgaatatgtcagactgattagagaatggggaaatttattcaaaaataaaaccttggatcaaattaaatctgatgatttgccaaaatacagagaatatcttagagctttaaaaatctatgaaggagaaaaatctgactatcaaaattggttacaagcttcaaagtatagcgtaaacatgtttccgattgtaaaagatagcttaaaacactatttcccaaatgaagattatagctacaagcaactagatagtttatataagatacataaaataaatgacaaaacctttagacaaagaagagtggacgatgatcgggatataggtgcaatgatcggttttatgaaaactagatttgaatatggtgaagaaacccttgaaaagatgaaggaaacggaaagggaagttgattcagttacaaataaaaatttaaacttagactataatgaaagattattaataggagataatcctaatgtacttgaaaaaggatatggctccggtcgtattagtattcttaaaaatggctttaagaatatccaagggcattctactaaaatatcaggaatcatagctgccaatagagataatcataaaggcgtaaaaggtttttctcaaaatattaaaattatgcctcttgctatttctttttcaggagatgaacatgacaaagacattgctatggctatttattatgcagtcgataatggagcaaaagtaatcaatatgtcattcggaaaagaattctctatccatcaaaactgggtttcagatgcttttaaatacgctgaaaaacgtaatgtgttactggtccatagttcagggaataattcttttgatacagataaaaatccatattacccaagtgacagtaattttgaagaaacttctgaaatttgcaataattttataaatgttggttcaatatcttcacgattagacagcactttcgtatctagtttttcaaattatggtaaagtaaatgtggatttgttcgcccctggagaagaaatttacactacagccaagaataatgcctacgaatctgattcaggaacttcattggcagccccaatggtttccggaacagctgcattaatatggtcctattatcctaaacttactgctgctgaggtaaaacaaattatactagattcgggaacggcttatgatatcgaagttattgttccaggtacagaagacaaaaaagttcctttttcagaattgtctaaatcaggtaaggttttaaatgtttacaatgctatgaaacttgctgaaaaagtcagcaaaaagaaaaaatgacatcgaatttcaagatagcatcctttgatgcttatgtattaagaactcccttatttccattgtctttatacctcagcacagtggaaaattattcggctgaaaaagcaaaactacaatatcaaaatccactcattcgggaagctattcatttagcttctccggatttgacaaaagaattggataaatgggtgaaaaccgattcaaacctgtctgttgaaaaggcaaaaaagttagaactaacattcttaaaatatttggccagaatgtcctccaggtgtactccttttggacttttttcgggctgttccgtggggagaacagctgctgaaacgaaaattattctggaagatacagacaggtttgaacgttttactcaatttgatatgcaattctgggtaatgctgcttcaggaaatttccaaaaaaaaggaagtaattccacatttgaaatattaccctaacaatagtatttacaaaattggagatttttatcgttacatcgaatacaaaagtatagagacaaagcgggaacacagtatttcggccttacgagtagctaccctactaacagaactgcttgactccatacaacaagggatgactgttgaagaaatggtcacgtttttgtcggatgacgaagatgaaaaacaagaagctcatgaatatgttttaaaacttattgattttcagtttttggtaagtgaattggatgctgttgttacaggaattgacaacggggaaaggattttagatgttttgaaaaaaattccggctctggagaacgaatatcaaatgttagaaaaaattctggaagagcttctttccttagataaaaaacttgttcctactgaaaagacctatcagaaaattaaaaacaacataaaacgtcttgaaattgactttgatgaaaagtatctttttcaaaccgatctaaattcaagtacctcagtaaatactttaaacaaaaatgtttcccaaaaagtattaagggccgttgagtttttgaatggtattcaaatgaaagagaagtttcagaatcaggaaagtttcaaaaaagcatttacacaaagatacgaaagcagagtaatgccattgacaaccgttctggataccgaaattggaattggttatctgcagaatcaagaaatgaatgacaatcatgaggttttagagtttctttctcttaagtctaaagaaacggagaaccaaaacgaactttggacatcttatgattatattcttcagaaaaagatacaagagtgcctgataaaaggagggacagaaatttcgttaacggagaaagattttcccaacttcaatactgattttagtaacgctccggccacattttctgtactatttgaagttttaaatgaggaaaaaattgtaattgaatcttccggaaatgtaagcgcagccaaactattaggacgattctgcaacggtaatgcatccatccataaactaaccagggaaatcatagaaaaagaagaggtttttcatgccaatcggataatggcagaggtggtacatgttcctgaatccagaacgggaaatattttacgcaggcctgttttacgaaaacatgaaatcagctatttagcaaaatccggagtgcccgaaaatgataccattcctttaaatgatctgtggatttctatagaaaatgataccataattctgttttctaaaaagcaccagaaaaagatcattccctgtttgtcaaacgctcataattttgctaaaaattcgctgccactttatcattttttatgtgatttacagtctcagcataccaaaccgatttattcttttgattggggagtcttaagaaatcattacacctattttccaagagtactgtatcgcgatatcattttatcaaaagccaagtggattgtagtaaaagaagaaattatgcctttttctaaaatgaacgataaacagcttttggaagattttttaaaatggcgttcccaaagaaatattccccgttatgtcaattgggctaatcatgaccatacacttttgtttgattttgaaacccaaataggagttgaactatttttaaattcagtcaaaaataaagacaaaatcactttggaagaattcctgtttacgaaaaaatctgtcgtacaaaatcaaaacacagctggttattgcaatcaatttatactatcattttacaaagaataaaaatgcagagaaattcttgtttaggcagtcagtggttgtattataaaatttataccggtgtaaaaacagctgattatattttaattgaaaaattagcccctgttataacctacttagaaaaaaagaaaaaaatccaaaagtggttttttattcgatatcgggatcctgaggaacatctgcgaattcgttttttaatagacgacgctgaaaatatgaccgcactcatcaattcattttatcctatttttaaagaacttctggatgaaaatataatttggaaaatccaaaccgatacctatcaaagagaaattgaacggtatggtaaaaagaccatctatgattctgaatttctattctggaaagacagtaaaatgattttaagctatctgagtctgaaaacttctttcctggcaaaagaaacgtctatttgttttagccttttgatggttgattctttccttaattcgttcaggctgtcaaattcggaaaaattaactttaatggataaacttcaaattgcttttaaagaagaatttgaaataggtaaaattcagaaaaaggaaatggatatccattaccgatcactgtatccgcaaatcaaactttttctggaagctgaaaatcaggataattttcctgaaatcttttctattgtcaatagaaaatcaaatcttatcgagaaaaaggtttttgaaataatcgataaaattcaaattcccatagatgattttttatcgagccatattcatatgatgattaacaggcaatatacttctaaacaaagaacctatgagcttgttgtctacgaccatttgtatcgctattataaaactttatgttacaaaaagtaaaaatcactcttcatacatctccatccacaaacgggtctcttccaaatccagttccttttcaattttcctgaaaatctcttcgtgaacagagcctgttttgtgcatcaattcgagtttatcacgttctatgtttaaaagatcgatctgcagtttagtaaaatcattgaaaatctcccctcccaaaacttttccttttccgaagaaattggctgggagctccgttttttgaagacgattgaatttgacttcatatttactttttatgttgtgcaataaatcatcgttgagtaacgaaaaattatcctcgatatgcgttatggtttgcgaaacgatggtatttcggatttcatattcttcggcaagaatcgaatagggctgcacttttaactttttaatcagccacggtaaagtaagtccctgaatgaccaaagtggaaagtatcacacaaaataccaaataaatgatgaggtttcgcaaggggaattcggttgttttattcatcattaacggtaaagccagcgcggccgccatggatactacccctcgcattccggaccagccgaaaataatcatgttgcgataatcaaattcttctttcagacggattcttttactgagcattctcggaagcaaagttgccggaaccacccataaaaaccgaaccaaaatcaccactacacttatcgaagccccccaaacaaacaaggaccaaccggagtaatctccaattccggtaataatttgtctcagctgaagtccgattaggataaagatcaaaccatttaaaatattggtcaaaacactccaaatcgttccggccataattcggctttcatgcgtaaaaatagttccggatcgggctgacaaataaagtccggtagcgactacggccaaaactcccgaacattcaaaatgctctgctattaaataagaggcaaaaggcgttagcaaagtcaaagtagcttcgatcacctcatcacagacaaatcttttgtgaatataacacatgatataccccacagccaaaccgattgcgattcccgctaccgacatcacaacaaagtttaatccagcctgccatagcacaaaattaccggctgtaatggcggttaatgcgtatttgtacgctaccaaaccgctggcatcattcaccagactttccccttctagaattgcaataaacctgggatgtaaacccaatcctttagtaatggaagtcgcagaaacggcatccggcggtgaaactatcgcccccaaaagaaaggctaaaggccaggaaatatcatcaatgagcatatgagctgcaaaggctaccgctactgtagtaaaaagtactaaaccaacagctgccagagtgatgggacgaattgtttgtttaaaatcggaccagcttgtgtaccaggcggcgtggtataaaagcggtggcaagaagataataaaaaccacctcagggctcaaagcaattaccggaagcccgggtataatactaatcaccacaccacaaagcaccagtacaatcggaattggaaagttgtactttttactaacgagactcaaaaaagcgactccaaatagcaacatgatgattacagtaatattttccattttcgaattgttttggtatttcggttatactactacgaatatactatttttagatctttggaaattattcagcatacattttatgaaacacatagaaacagagatttaattattattcgtgaagactattcaaaaaaatcatgattttcacacatagtttatactctataacgaaactaaaaatccctgatataacctgcctatgagaatttatgttaagtaaacgacttttttagcattcttaatctatgtttctatgtgtttaataaataaacaccataaaactttatgtaaaactgttagatctcctttaaccaaattttattgcatccgacattataaatactttaaaaaaaattacatttgaaccttaattcatatcccaaattatgatcctgaaaagaaatttcatcagtgtaatcgccttactggctgtctttattaatacaccgattgcctattctcaaactactcctccaaaagcagaaacgaaatcaaaactatttgaagaaacgactacggacagtgactatctaatagcaatcgaaaaagccggagaggttttggaatctgcccataacgatactgaatttgatggaaacagccatcgtttgtttagtgaaatcaaaggaacacaaagtaaacttgatctaatcctggccagcttaaaaggtgcaaatccaaacgtacgcaaccaacaaatgtatcgtatcgtactcaaagaaattgagcaggaactcaacgaacaaaatacagccataaactcgcgcaatctggcacttgaaaaaatcaaaaacagggtaattgatttgcgcaaggacaaaactttgatgggacttttgaaagatactcttcgacgcaagcaatttaaaagtgaatttgtgaatctaaaaagaagatacctgagtaccgacagtctgatgaccaaaaatcaggggattttaaaccataataaacgattaaccgttgaacgaaaaattgccgtatcaaatgccttaattactgtagaaagcaaactggaaaaatccggaatcagtatgcttaaaaaagagtacccagttttatggagtacaaacgattctgttgcaaaaaagatcgtaggcaaaaacatcaaagccaaaataataattgaagaaaacgtcgcagagtattatttaagttaccgagccggcggtttaattacactggttttactgatgggattactgggctggtacatttcccgtaatttaaaatacctcaacaataatgcacatgctgaaaatctgactcagtttaattttaaatacttaaatcgaggagtggtggttccagtggctgtcattggtcttaacattgccgtggtaagcaatctatacgctcctgccctgtttattgagtcaattcaattggttcttctggggcttttaaccgtgcttttcaaaaacaaatggtcgggtgtcgcgatgcgaaactggttgtttctgttagtcttattttttatgttatgctttctggatttgtttatcccggttggctttctacagcgcagcgcctttattgtgattaatattttaggaatacgatacggtttagtacaaattaaaacgttaaaagaacagctttacatcaaaggtttttttaaatgggccaccatcatttttatcggtttaaatgttttatcccttatcgataatcttttgggaagagtctctcttgcgaatatgttaagcctaaccgcctttatatcactcacgcaaattgtagcactcagcgtactcttaaaaatcgtattagaaatcattcttttgcaaatttataccacccgaattaagcgtggtatcgaaaagatttttgatcatgaaagtctgtccgatacgctaaaaagaccattcattattgtaatcagttatatgtggattgtggtcatcgcagccaatttaaacatttgggaatctttgcgtaccggtttgggttcactactaagtcatccaaatacgattggaagtatcacttttactctcgggaatatagtgttgttctttatcattatttgggttgctcatttactacaaaactatgtggcttatttctttggagaagttgacgatgaaaacgaagaaaccatcaataaaagacagcattctaaattactcatcacaagacttgtcgttttaataagtggttatcttttagctgtagctgcttcaggaatgccactggacaaactaagcatcttactgggagccttgggtgtcggtgtgggtcttggacttcagaatgtggttaacaactttgtttcgggtattattttaatttttgacaaaccaatccagattggagacgtcatcgacattagttccgaatccggccgggtaaaatccatgggattgcgtaccactaaaatcaattcctcaaacggtgccgaaatcattatcccaaatggtaacttattgtcacaaaatattaccaactggacgtatactgataattttaaactcgttgaaattacagccgaagttaccggtgatgttcttcccgaagcaatcaatgctattattctggagtctcttgaaagcatggcattggtcaatactacaaaagttcctcagatttattacagttctatctcagatggaaaattcaaattgcagataaaattctggtgcagcatttaccgtacagaagaaacgatcagcaatgcaagacaggttcttttcagtaattttaaagaaaaagggttaacattgtctacctaaatatactccaacttttcaaattcaaatgcataaaaaaaacggaaatgactttttaaagttatttccgtttttgcttttctccttaaaaaaataaaaaatcagtctgaactattttagatccggctttaaaattactttccggtgtcacttcttacatacttattcaaaatataacgtgttaccggtctcaacggactattattctccggatgtctgccgtgcgcatcaaaaaaatcaactccatttgccgtcttagcataccatataatcgctactccatttttatcaaaataagtggtcgtatcacaaaccttaatctttttaagatggacaagcgttgggtctaatatttcaatatttgcagacttaaccaggccttgtatttttagatcacaatctaccatttcataatgatcccctgaccactgcatacattctttatcaggaaaagcataatgactgatcaaaaatccgcacaaaaaaataatgacagtaatagaaatcgtcctcaagactcttttggaaaacttataacaaatcttttctataaaactcttaaacaaatagattgctattgctccctctgatttcttttgtactaataccaattcagtgtttttatctacaccactttcattcttttctcctttttcatcaggatctgactgaggcagattacaacctctcattatttcttctacatcacttgatggctctccattattagaatcattaacaggttctttaccctcattccttaaacttctattaaatttttgataaggtcttaattcgaaccctaccaagatccctgctagatttacagtatctatttttgctggttctttttctctttttaaaaaatctccaacctttttaaacttatcagtataactagtggaagtattctcattatttgggtcaaagttaaatttgaaaaaattataatatatcgctaaatcatctgagttgataatatcagatttaaaaatcctccaacataaatctctcaaactagcttgtgaagggttactcaaataatcggagtaaatcccatcatctttctctctttcaaatttaattctaattgcttctttataatcatttggtgtattgtttggcataggcttttgtttttttggaattttctatgactttttaggattttttaggatttgaaaaaacttattaagagttcccggaattccgtatcaatacaggcttacaagcgtcgttactttgccttcagaatcagttaacgttttgatctgcaggtcaaaaacaaaagtactaaactagttcaattaaaaagtgcggaaaaccgtaaaacggagtttatcccgggaagtataaatgaaaattttacggcctacgcacttcacttcccaccaaaattggcattgcccaaacatgattcagaatagttctgaacaggcacgcctataaccaatctaaaaaatttcgacatgaaaaagatattattttggggagcttgtaccctattgacaactatgttatactcttgcaccgctgacgaatacgatacagcaaaaacaaatgacaaacctgcagtacctgcatatgctgacggtcccggagatcaacccataacggttccgccaccgccgccaccaacaaaataatagtaaattagattattacatttacaattaattagtatttttaggggaaagtaacttttatggtacgatccccttttttttattttttatttttcctgctgcttctttcctgcaaagaaaaaaccgtcgatactgttgatactacctcaactaaaaaagaggccagagggtatctcagtaaagggatggagaattttcagaataaaaaatttaatactgcattctaccaatacaataaagcaaaaatagcctgcgaaaccttaaaagacagtgccaatattgtgtacagcctgattcagatggctaatatacagcagatcaacggagattattacggcagcaaagaaaccttaaccgaagcactgccttatctcaaaaagaaagatgtgtatagtgctgccattaataatttatttggcattgctgacaaagaactctctatctataatgacgctattttcttctataaagaagctttaaaagactgtaccgatgattcgtccagacaatctcctttaaataatattgccgttgtttacattcagcagaaaaaatatactgaagcaatcaatatcttaaacaccatattggataaaaaactcttagataaggaacctcctaaaaaagcaagggttttagacaatctgggttatgcctattttaaaatgggtgagacggaaaagggatactccctgatgaacgaagggcataaaatgagaactcagagcgaagatttctacggaagtatcgaaagtaatctacatttagccgaattttattccaaatcaaattcccaaaaatctaaccaatatgctcaggcagcctatcagcttgcaacacatttcaatagtgttgatgaacgcttaaaggctttgtccttgttaatgtctaatgattccggaattaaaaacgtacagtatgcccaaaagttcattttcttaaacgacagtattattaagatccgaaacaattttaaaaataagtttgccaaaattaagtacgattctaaaaaagagaaagatgaaaatcagaaacttcgtttagaaagagccgagaacttactttcaattcaggaagccaaataccaaagagcgttttttataataggaatcgctgctttgtgtcttttattattgtatttgagaaaattttatcaaaaccgaaaccgaatcgaaaaattaacagcggcatacgataccgaaacccggattgccaaagacattcatgacgaattggcaaatgatgtttttaataccatcacctttacgcaaacacagtccctggaaagtacccatataaaagacaatttaattcagaaactggatcagatctacaatcgggttcgtggaatttcaagagaaaataatgaaattgatacgaaagccaattatgcggttaacttaaaagaaatgctttcgacatataacagccccagtaccaatgtcattattaataatattgaaaaagtaaactgggatttagttgatgatatcaaaaaagttgctgtacatagggttctacaagaattaatggtcaatatgaaaaagcacagcgaggcattagtagtcgttttgaaatttgaaaatactgccaacaaaatacttattgaatactctgacaatggcaaaggttgtgaaaaagataaaataatcaaaaatggccttcaaaatatggaaaaccgtattctggccacaaaaggaactattacttttgacactgaaccccacaaaggttttaaagtaaaaataacactgcctaaataaataacttatgtttaaaaaagtactagttgccgaagatcttgatactatgaatttaggaattgaacaagtcctgaaggatttaaatatcaaccattttcaacaatcaaaatattgtgatgaagcctttctaaaaatgcgcaaagccattcaggatgatgagccttatgatttgcttattagtgatctttccttcaagacagatcatcgcgaagtaaaaattgctaacggagatgaactggttcaaaaagtacgagaattacagcccaacattaagatcattgcgtattcggtcgaagataaaagctaccgcattaaatccctttttgaaaatgcaaaaatagatgcttttgtagcaaaaggtctgaatagcatcgaagaactaaaaaaagcgattcacatcatctcgaccacagatcaaaagtttatttcacccgaagtcgcttctgcacttcaggaaaaaagcaacttcgaaattgatgatgtcgatattaaaattctgaaatacttatcagccggaacttcacaggatgaaatcatagaaatttttaaaagcaccgatattaaacccaatagtaaaagtgccgtagaaaaaagattgtcaaaacttaaagacttttttaaggcaaataatacgattcatttggttaccattaccaaagacatgggaattatctaaaagtttcttctactcactatactatcaaagctccttcaggggctttttttatggcctgaatataaatttaatggattatggatttccgtaaaatactggtttcaaatagatttaagtttgaattataaatccatttaaactcaaaaacaatgaaaacttattacgtaaatgacacagaacaaaagagcggagatcacgaagttcatactgatgaatgtccttattttaaatcaattgcaagcaaaacattcctaggcattttttcaaactgcaaagatgccgttggccaatccaaaaaaatttatcccaactctgacggttgtgcctattgctgtcgtgaatgtcacaaaagataattttcatcatgggctttcgatttcaaaaaagaataaaactaggaggaggttttggcttaaacttaagcagatccggaatttctcccagtttaagaactaaaatgggaacattcagcaaaagtggttattctgtgaagaccggaatatcaggactacgatatcaaaatagcggatgcattacactaattgcatttacgggaattatatcatttttaatttttacaataaaacatttataattatgggatacagaaaaggttactttaaaaaagacgggacatatgtccaagcgcattttaccaatacaagatcaagatcttattcaaaaaagaatagcggctgtatgttactattacttatcacaatgacattcggattggctgtttcttgttcagaatcatcggattcaaactcaaactgtccaaccaaaacttgtggtgattttaccactcaggctcaggctcaggctacttatgacagtaacagaaactgctacaaaaacctcgatcgggacggtaacggtaaagcttgcgaatctttaaaataaaccatgataaacgatgataacactagaacttaaaagccactttttgagattgtatcaaatggcattatccgacgatcagtttgacgtattagaactgcaaatgttatatcactttgcagacgaacgcggaattcccagagaggaattagacaaactttttctaaatccaattaacacagaattaattattcctgaagaagtaagtaccagaatagagtatctgtatgattttacaagaatcatttgggccgatggaaaagtcactgaagacgaacttaatatgctcaaaaaatactgtaggaaatttaattttcgggacgaaaacattaatgaactctccgattatctcattgattgtgttcaaaaaaacatcggaaaacaagaaattattaatcagctaaattcataactaatgaaatcacttacacaactatttagtttaaaaaaagcagacgatactcaggcaaatactcttgaggaaaatgaaaatgatcgcgagcaaattagaataacctactatcaaagtgggtttgcggcctctataaaagcgacgggaaaaccaattgttctaaaagcctgtttacaaaatttgtatatgagttttgaagaccagtgccgaaaacaaaagctggagcaagaccgattaaagcagccttacaaagaagaacaggaaaaaaaccgaaccgaactcaaaaagtcagaagcggccattggtatttatgaaaaaaaagagcaggatatcaatgacgaaatcgatcagataaaagaggaaataatcgaagtaaaacgcaatcctgataaatacggaattgaagatggaaaaggccttaaagcccaattctatattggtttgtttctattacttccaattacactttatgtactggtgttttatatttcggcatcctactctgcttttttcaaagagtttgccaatgatagtctcacggctgctatttttgatgcaaacgctttaaccaattcttttgaagcaagctggctcgaaggtgttttggtcattaccattccctttgtttttatgggattaggatatgtaattcatatggtacaaaaaggaaaaggtataaaaaacattttaagaatgattgctttatttgtcaccacctttttatttgatgccttactggcctatcagattgagaaaaaaatatatgaatttaataaaactacagattccgctccttacaacctgaacattgcattaggtgaagctgaattttggatgatcatctttgccggatttgtagtctatatcatctggggacttgtttttgattttgtcatgaaagaatttgaaaacattgacaaaatcagagctttcatcagaggtaaaaaggagaaccttctcgatttagacaaactaaaagcagaatacctcaacaaaatcaatgatttcaaacaacagaatgttaccatcaacggaaaaatttcagaattacaatctaaaatagatggttttgtgtttcctgtaaaagaatatcttcattatcatcatcaatacaaagaaggatggtttcaggctattagtactgaaatagcacttccctacaacgaaaaaagtgaattattacagaactgcgaactttcctctgaagaacacttaaacagattaaacctggttgaccctgattttcaacaattagtctattctaaaaactaataacgatgaaaaatagtctcaacttaatggcaatttttttattgcttatttcgattatctcctgcaaacaggaatctgataaaggcgaaaaggatacctcatccaaaaataccgtatcagaaaactataatatcagtatccttcttgatttatcagacagaatcagtctggagaaaaatccaaatccaacaatggaatattttcaaagagatctggggtatataaaatctgtatctgaagcttttacacaacatttaaaatctaagagaataaggcagattgacgataaaatgcaactgtttttcaatcctgaacctctggatcctgaaatcaatacaactgctaaaaatttgagaattgttatggataaaaataatgcttctaaaaacttattgaattccatcaatacaaattatacagcacaaacatctaaaatctataattccgccataaaagacaatcattttattggttcagatatttggaactttcttgataccaaagtaaaagatcaatgtatcaaaaacgaatatagaaacatattaattgtattgaccgatggctatatgtatcatgaaaacactgtaatagccgaaggaaacagaaccacttatattacacctgaattcatccgaaaaaacaaattaaacacgaaagactgggataaaaaattacacgaacaagattatggttttattaaaataggagaaagtttacccaatctcgaaatactggttctaggaattaatccgggcaaaaataatccatacgaagaaaaagtgcttaaagcctactggacaaaatggttcactgaaatgaaagtaaaccgttttgaaatcaagaatgctgatttgccttccaacatggatcagatcattaaaaactttattctgaacaaatcgtaaatcaacaaaactaaaacattgaaagaggaattttatcgtcctcttttttctatttataaaaacggtaacatcctaccgaaatttcacctcacattatggttttccgtaaaatacagaatctgaatggttctacttttgaatctctaacttaaactatagaacccatggaaattaaccttcaactcaaatcattagcagacaaaatcacacagcttaaaagcaaaattgaaactgaggaatctaccaaacatgcttttgtcctgcctttcattcatgcattgggatatgatgcatttaatcccttggaagttgttccggaatttaccgccgacctgggcttaaaaaagggagagaaagtagattatgctatctttcaaaatggtgagcctattataattgtggaatgtaaaagctggaaagaaaacttaacggtacacaactcacaattgttccgctactttcatgtcaccaaaacccggttcgctctcttgactaatggtatcaattatcagttttttactgatttggacgatcagaacaaaatggatgaaaaaccatttctggaatttgacattaccaacctcaaagaaaacacgatcagcgaaatttcaaagtttcacaaaagcagttttaatgttgataatatcattagcaatgcaagttcgttaaaatacatcaaggaaatcaaaaagcaaattaatgcagaacttgaaaatccttctaacgattttaccaaacttttcgccagtaaagtctataccggaagattaaccgaaaaagtaatggatgagtttaaagatttggttcagaaatccatcagtcaatatattaacgagagaattaacgatcgcttaaatgctgcgctgaccaaagaaacaatcaagcaacaggaagaacaggctgctccccttgaagaagaaagtaaaatctacaccagtgaggaagaattagaaggatatcgcattatagttgccatattaagacaaaaacttccgacaagccgaatcgtatatcgtgacacccagtcgtatttcggaattttattagacgataacaatcgtaaaccgctctgccgtcttcatcttaacggaggaaaaaaatacatcagtctttttaatgataacaaaaatgaaacaaaaaccgtgattgcatcaatcgacgatatttaccagttcgggaaggaattactcgatactgttggactttatgaaaccgaataaaaactattattatgaaatacactttactgttctttcttgtactattaacttcttttcatccatttgaaaccaaagtatacatctgtggagcgacaggtgctaaaaaataccattacaacgaaaactgtcgcggtctgacttcctgtcgtaatgaaatttccaaagtgtctattaaacgtgcacaaggtcttggactcaccctttgcggctgggaagattgacctttacagagcaacaaaaattatcttaaacatttgataataatgactttacatttaattcacattagttttattaatttgaataaaactaaacgttatgaaattctttaatctaaattttctggtttcattcaaagaatggctttttttaagagcgatgcaatcttctttcctgcattaataaattacaattttaaaaaggaaagtaccattgaatgaataaagttgagacctcatttttgcacaaaaaccaatttggagatgatttcttgtggggtgtttcaaccgccgctttccaaattgaaggcgcacacgataccgacggaaaaggtccttctatttgggatgtttttacctctcagaaaggaaaaataaagaacggacatcatgcttcaactgcttgcgatttttataattcgtaccaaaacgatatcgatttaattcgcgagctgaatattccgaactttcgattttcgatcagctggccccgaatcatgcctaccggggttcctccaattaatcaggccggaatagcctattacaacaaaatcattgacgctctgctattagccggaattgaaccctggattacactataccactgggacttgcctcatgatttagagcaaaaagggggctggaccaatcgcgaatcggttaactggttttcggcctacgttgaaatctgtgtgcaaaattttggtgatcgcgttaaaaactggatggtaatcaatgaaccctccgtttttacaggtgcggggtattttttgggtattcatgctccgggaaaaaaaggcattaccaattacctgaaagccatgcaccatgtcactttagctacagcagcaggtgccaaaataatacgaaatcgtatcccggacgctcacattggaacaactttttcctgtacgcatattgaacccgcaactcagtcttctaaagacattgaagcagcaaaacgagtagacactttattaaacagaacttttatcgaacccattctaggattgggttatccccaaggtgatttaccggtattaaagaaactcaatgcttatattgtagaagatgatctcaataatttgtcttttgattttgattttattggtctgcaatgttacacccgtgaagttgtaaaatcgtctttacttattccgtatatcggtgccgaattaatcagtgccgaaaaaagaaaggtcatttcaaccgatatgggatgggaagtttaccctcctgccctttacgaggtccttaaaaaatttaatgcctacaatggcatcaaaaagattattattaccgaaaatggcgccgcttttccggatactttaaaaaatggaaaggtatatgatattaaacgtacgcactacattcaggaccatttggagcaaattctgaaagctaaaaaagagggtctaaatgttgatggttattttgtctggacacttactgacaattttgaatgggccgaaggttacaacgcccgttttggattgatacatgtagatttcgatacccaacaaagaaccatcaagcattcgggattgtggttcaaagatttcttgtcttaagataaacgctgtataaagtaatttccctacactttcattgacgaaattagaacaaattttattggctcaaaaagtaaaaaatacgacaacgaaatcttataaaatttctctgttaaaaagtaaaaaaaataccaaaaacccttgatttcattaggtttactggtgtttttttcttatctttatagtataaataacagccaatatatgccgaaaaaaatgctctttacacgcctaaattttgtttcaaaaaatgattcattttacttcttcctgcattttatttttcaaaatgcttctcaccttcatttcaaaactattccgtttgatcttttttccgcacaaagtataaacgtgcagaagacacaaaagcgaccgccccaactgtagctgtaattatttttctgggatagatcttcttaactattttttttgagagtacatacttaaaattatagaaacgatttcctttttcgggataactttctatgaggttgccttcttctatgatctcgacctcagcagctgcattaatttcgaccacacttatcatgtgtttgacctcattaattcggcacttttcattgtactttttaaaaggacgaggttgaaagtctaccataattgctgccagatttatggcatcaatatttgatggatcagtctctcctttaaagaaagtttcgatcggtctgaacttgtctttttgttcattaaacttattttttcgtgtatgatcaaaatccaaacacaataaatttctgaaaacatttaagtcgtcctgagtcgggttattttcaaaaataagccaacataagtcacggagctttgcgcgcgaagggttgtacaaataatcaaagtattcaccttctttttcgatctcgtatttgctcttaatcgcttttttatattcttctaatgtctggctatgcatggtatttttttgggaattttcgggaattgttgggaatctcaggaaaacgagggaattctgggaatcccttaccattaaaggctttaaagtgtcttttctttgccatagaaattagttcaagttttatctgcagattaaaacaaaaatataaaactagttcaaattaacagtgtaaaaaaaaccgtaagaccgattttattcgggaagtataaaaaacgtcttacagttctacacattgtacttcccaaaaaccaaattggtattgccctaaccaacctccggactatttccggtcagcaatacccatgtctaatttctaaatctaaataaaatgaaaaagctaataatttttatcgctttcacgatactattcactatgttctcctgtacaccagatgaatacgaaactccaaccaaacaggaaaaagaaaaagcaatcattccagcaaaaccaacttttgctgatggtcctggtgataagggtacaacacctcctcctcctccagcggagtaaatatatatttttagtatctaaattaattactattttcggggaaagtaaatttatatgttacgatccccgtttttttattttattatccttctttttcttttttcctgtaaagaaaatactaccaataatattaacacagaagctatccgtaaggaggcacttaatttacgaaaccaagggattgaaaatcacaataaacaaaactttaatactgcttttgatcaattctataaatcaaaacaactttatgaaactttaaaagaaagtggaaaaaaagatagtgccaatatcggttatatacttattatgatggcgacaattcagcaagttaatggagattactacggtagtaaggaaaccgttaccgaagcattatcttacgtaaaaaagaatagtgtttatactgctgaaataaataatcgattaggaattgccgacaaagaactttcactttatgatgatgctatttcttactataaagaatcagcaaaagatattaaaagtcctattgaaaaactagatcctttaagcaatattgcagctgtttacatccagcaaaaaaaatataacaaagcaatctctttactagaatctattttaggaaaaaattcattgaataaaaggtatcaagaaattggcaatgttattcttatagataacctgggttatgcctattttaagaatggagtggacgaaaaaggatttcaactaatgaatgaagcactcaggatcagaaatgaagctaaagatacctacggcagtattgaaagttatctgcatcttgccgattactatgctaaaaaagatcttcaaaaatcagatgaaaatgctcttgcagcttacaacattgctacaaaactaaacagtgtagacgaaagattagaagcgttgcaaattttaatctcaaatgatcacagccccaagaccaatcaatatgtacaaagatatttcaaactaaacgacagtatcattaaggttcgcaacaactttaaaaataagtttgctaaaattaaatacgatgctaaagtagagaaagatgaaaatgccaaacttcgtttagaaaaagcccaaaatcaattgtctctccaaaaagctaaatatttacgaattgtatttgccattgcttttgtttttttagccattctaattgtaattgtagtacgttactacaaaaataaaaacaaggcgattgaatttaaaacctcgtacatgacggaagcccgaatcgcgaaaaaaatccacgatgaattggcaaacgatgtctataacgtaattgcttttgcagagtcacagcctttatctaaagaaaacacccgagaaaacctactccaaaaactagatgatatttacggacgtgttagaggaatctccagagaaaataacaagattgagaccggtgcagatttcacttacagcattaaagaaatgctttcgacttacaaaaccaacgaaagaaacattattgtcaccaatttagaaagcatcaactgggaaacgattaacgatactaaaaagatcaccattagccgaatcttacaggaattaatggtgaatatgaggaaacacagcaatgccagtattgttggaataaaatttgaaaataacgagaaatcaatcgctataaactataccgacaacggtaaaggttttgaaaaggcctctattgcaaaaaatggtctgcaaaacatggaacaacgcatccaggccgttaaaggaactattacttttgatacagcacccgataaaggatttaaagcaaagctatctatacctaaataaattcaatattataatttgactatctaataactttcctatacaaaaaaagcctttcaagattactctcaaaaggctctttcccttcaaaaaacaggctaataaaaaactaatcctgtatactatttcgtcattctaaggcaaataaaccttagtttaaattagatacaatatctttttccaaaacttcaacagcttctttccagttgtttacccttaaatggtgcgtcagattaacgttatgaaacgcggtaaacataattggttttcccatgcaatgatctaagtttttcctgtgatcgtcaatcatataatcggtattgataattcgtttactgccacataaaatgatgttttcccatgtgataaaaggaaaatgctctgccagccaggctactttctcagccagtgataccggaaactcagtcgcagctgaaacaataaatatttcaaagttttcctgtaatcggcgtaaactttcgactgcatcgggtattaccggcagatttctgaaaaaattatctgcattcaaaactttacgcaaaagtaccctgtcactaaaagcttcttcttcgcttaatccctgaatgctttcttttgaaagtgaggttccgctctcttcgttataatcttttattaattgtgcttcaatgtcggcaagtacgccgtccatatcgatggcaatagttttctttttcatttcgattaattttgcaacaaatttacgcaaatattgcaaagtattgcaattttaacttatttttgcaatataaatttgcacaacatgaaaaaagaggaacgtcaaaaagtaattttagaatacctgtcaaaagaacatcgacttactttacaagaacttagcgtctatttaaatgtttctgaagacacgataagacgggatgtaaaagaactttcagatcagggattgttaaaggctgttcgcggaggtgcggttgccccgtctccgattccgcttcattttagaaacagagagaaacatgaccttgaaaacaaaaaaataatagccgaaaaagcaatctcttatttaaaagacggacaggttgtttttatcgatggcggaaccacttcattagctttagtagccagtttcccttatgatttgaaaataacggttattaccaacagtttccctgtagcggctctaatcgaagatttacccaatatcgaattgatttttgcagggggaagaatgtgcaaaacttctttcgcgactgcaagtatagaaactatagattttttccgaaattttagagccaacatttgtattctcggtctttgcagcattcatcacgaacgtggtgttacgggagttttacacgatgattctcaaataaaaagaaacatgattcaacactctgattttgtgatcgctctgggctctatcgaaaaagtaggcactgctgaatcttatttcgtttgtccgattaaagatattgacgtactggtgaccaatattgatccggaggatgaaactttaaaaccttatcaaaatgcaggagtgacacttgtttaaaaacttttggatttcattacacactataacatcagaattataaacctaaaagtgcgtctttaatttctgttccccacgataaaattcgccttactatttttcataactttacatctatcaataaattaatcctaaaaatccatttactatttgaaaattaaacatccgtaaaatgcaattccaatattttttgccatcagaaatcctgaagccttatatcaaacattactatatttttgaatcagattcggataaggagtttgaagacacggtatttccgagtggcgaaatggaaattattttcaatcttggcgatggcatttgggaatcattggttgaccagactttctacaaaactccaaaaattgaattttgggggcagatcactaaacctctttccataaagtcacaaggcaaacatatgatgttaggaattcggttttatactcatactgcagcttatttttttaaggatgatatcggaatattcaacaatcagattttcgatctagaagatatagttggtaatccgataaaaaaattacacgaacagcttttagaaacttctgatataaaaaaaaggatcgaactgatcgaagcattcctgatacaaaaaattataacaaacgataaaagagcggataagattgaaaaagtagctcacatcttatcgagtttactcaacgacccgacggaaagtaatatcaacagtatttcggtaaaatatggtataacgccccgttatcttcataaactagtctttcagcatacgggactcgctccaaaagcattcaataaaatcaaacgtttccaacacagtcttaagctcattaacactaccgaatatccctttacttctattgcttatgattccggctattttgatcaatcccattttataagggattttaaatcctttacgggaactacgccaacttcctatttagagaaccagttccctatcaatcaattaattatttaaaaagaatacgctgcattacagaattaattcttagtaccttagaaactaagcccctttatttaaaattcagttccgatttgtacaattcagacgtttttaacctgactatctttgacaaaaataatagtcaatcaaaaaactttatactatgaattcttttaccactacatcagaattgaatccaaaatcaacctttttcttagtgcgtttttacaacctattttttaatcgaaatctcattgatccgacattcaaattcattgcaattgtcttgttgctttccggctgtacttcttcttcaaaaaataaaacagcagatttaagcgaagcaaaaaaagcaatacaggaaagcaatgccatttattttgattcttttaaaaataatgatccctccctattcatagaccgatatgctgaagatgcttctatcttactcccgaacgcaccacaaatttatggaaaagaaggtgctgccaaatttttcagaaaagcttatgatgaatatggtctaagaggcggaaagtttattaccacagcagtatacggtgacggtgtagagtatgtcaccgaagaaggtttgtggcaatccttaaactccaaaggtgaattaatggatgatggaaaatttttggttctctggaagaaaacttcaaaaggctggaaaatgttcagagattcttttagcagtaatcgagaagctaaataattgaaataatctcttttacattcgtttcgcccgcaattaaaaaagcctctcaagtataaaatcttgaaaggcttttgtctacaaattaaaaagcaatattatttccaaccaccgcctaagtctctgtaaacatggactgcagcattcaattgttcttttttagtatctaccaattccagtttggcttctaatgcatctcgttgtgtcattaaaacctcaaaataatctactctggccgatttaaacaaatcattagaaacatctattgaagtgttcaaagcatctacctgttgcgatttaagatcataccctttttgtaagttttcgatcttcgaaagttgattagacacttctaaataagcattcaaaatggtacgatcgtaattgtacaaagcctgaagctgtctggcatttgcgctggcgaattctgctttaatcgcatttctgttgatcagtggtgcagccagatctccggctaatgaatacagaagtgactccggaaatgttaacagataagaaggtttaaacgcctgtactcctatcgcagctgaaatgtctaatgaaggatagaattctgcacgtgccacttttacatctaattttgaagcgactaattctaattcggcctgtttcacatcaggacgatttgccagtaattgagacggaattccggaactcaccgcagccggtagtaagctcaggaagttgtttgtattggttcttttgatttcctgtggatatcttcccaataaaaagttgattttattctccgtttcttttatttgctgaagaattccaaattccagactttttgaagttaaaacctctgcttcaaacttcttcacgcccagttcggttgctcttgccgcctgcttctgaatttttacaatttccaaagcattcgtctgtaatttgatggtttgttttacaatgtccaattgggtatctaaagccagtaactcataatacgaatcggctacttcggcaataagattcgtaattacaaagttcttcccttctaccgttgctaaatatcggtttaaagctgcttttttagaattgcgcagttttttccagatgtcaacttcccagtttgcataggccgaaatagtaaaatctcccaatggatccggggtctttacgcctggtttgatatctgtattggcatcacccgcaccctgactggtgtagcgccccactttctctactcccgctccggcacgaacaccaacagtaggcagtagaagtcctttttttacacgaatgtcatttcttgcaatctcgatttcctgcaaagtaatgtttaattcctgattgttcttaagcgcgacatcaattagctctaccagattctgatctttaaaataatctttccacgctaatactgccgtattgttgtttgcatcctgactctgagttgttgtaccaaacgactctggaactggtgtgcttgttgttgtagtctcaggagcaggggctttacaccctgcaaccatgagacatgcactcaatgcaatactatattgatatgatttgaatttatacatgattgttatcaatttcttctgttaatggattttcttcttcatgtttcactaatttgtatctctctgctatttttccaaagatgtaatacaatccaggaatcaaaaacaccccacaaatcgttccgataagcatacctcctgccgcagcagtaccaatcgtacggttaccaatttttccgggaccggtagcaaatgcaagtggcaataaacccgcaataaaagcaaaggaagtcatcaagattggacggaaccttgctttggctccttccattgctgcttccagaactgatttacctgcagcatgtcgctggattgcaaactctacaatcaacacagcatttttacccaataaaccaataagcattaccatggccacctgtgcgtaaatgttgttctctaatcctgttaatttcagtaaaaagaaagctccaaaaatacctgccggtaaagaaagaattacagacaatggtaaaataaaactctcgtattgagcagccagtaccagatatacgaatcctaaacagatcaggaatacccagattgcctgattcccctgtgctacctcatcagcagaaatacctgcccagtcgatgtcgtatcctctaggtaattttttggcggcaacttcctgaacaactttaattgccgtaccggaactatatcccgctgcagcagatccactaatttgtgtagaagtgtacatattgtgtcttgtgatttcagaaagtccgtatactttttccaatctcataaaagcggaataaggtaccatttcatcacggttgtttttcacatacaattttaagatatcatcgggctgagcacgatattccggagaagcctgaacaattactttatagttaattccgaatttaataaaactgatttcatagttacttcccacaagagttgacaaggtattcatggcattttcgatagaaactcctttttgttgtgccagatcattgtcgactttcatcatgtattgaggaaaactcgagctataaaaactaaacacgttagacaattcctgatgtctgttcaattcagcaacaaaatcattatttaccttttccatttttttgtaatctccggaacctgttttatccaataaacgaagttcaaatcctccggcagcaccatatcccggtacagcaggcggttggaaaaactcgatattagctcctgcaatatctttacatttttcctccatttcatgcatgatctccaaaacagattcttttcgatcgctccaatccttaaggttaaccaaacaagttcctgagtttgctcctgtaccttcagaaagaatttcgtaacctgccaatgaagaaactgattttactccgtctatatcttcagcaattttctgaactcgctctgcaatattgttggttctttctaatgaagaacccggaggtgtctgaattacagcatagaacattccctgatcctcattcggaataaatccggaaggaacggtgctgctcactaaccatgttccggcacaaaatcctaacaaagcaattatagtaacggctcttctgtttacgatcttacctaatacattttgatatttcccctgagccagattaaacttattgttaaaaccatctataaaaacattaacaggtgttttctttttaggcagagcatgattattttttaacatcatagcacaaagtgccggtgtcaaggttaaagccacaatacccgaaagtataatcgccgttgccatagtaactgagaactgacggtaaaacaccccaacaggacctgacatgaatgccaccggaataaataccgccgccatcaggaatgtaatcgctataattgcccctgcaatctcatgcatcgcttttttagttgctttaaaaggcgacagatgttcttcttccattttggcgtgaactgcctcgatcacaacgatcgcatcatcgacgacgactccaattgctaatactaaagcaaacaaagtaattaagttcaatgaaatatctaagaaagtcatgaatacaaaggttccgatcaacgataccggtaccgcaattgccggaataacagtcgaacgccaatctcccaagaaaagaaataccactaaacctaccaaaataaaagcttctaccagcgtgtggattactttttcgatagaggcatccaaaaatttagaaacgtcgtatgaaatctcataatccattccttttggaaatttttgcttaattttttccaatttcgcttttacctcctcaataacctgattggcattacttccaaaagactgtttcaatacaatagccgcagaaggcttaccatttaagttcgagtaaatatcatacatcgaacttccgaattcaatattggcaatatctttcaaacgtaaaagttctccgttagcattggattttaccacaatatttccatattgctcttttgtggtaaaacgtccggaatatttcaatacatattcaaatgcctgagaacgtttacctgaactttctcctgttttacccggagaagcctccaaactttgacttgacaatgcttccattacctcatcggcagaaattttgtacgccagcatacgatccggtttcagccagatacgcatagcatattcacgagttcccaggatatctccggaaccaataccatttacccttttcaattctgaaagtacgttgatatcagcgtagttgtacaagaacttcatatcggtatttttgtctgtactgtaaaggttcacgtacatcaacatacttggcacttctcgggtaatttttataccctctctaattaccaatggaggcaatttattggtaaccgaagctacacgattctgaacgttaaccgccgcttggttgggatctgttcctaagttaaaaactacttttatagtcgcctcaccatcatttccggcatcagaagacatgtatttcattcccggaactccatttaaagctctttctaaaggaataataacggccttgatcatcaattcaccgttagatccgggataatctgcagtaacattcaccattggcggtgagattgtagggaattgcgtgataggtaaatttaataccgacaatactcctaaaaagacaattataagcgatattactatcgacagtacaggtctttgaataaatttattaaacattttttatttttttaatgattaaacctattctgcttttaagcgtaaattgttcattaccgctttaggagattggaattcatatttgattttgtcgttttcttttactttttgaactccttcaagtaaaattttatcggtatcggcaagtccggtttttatcacgtacaaatcagggatttcgcctgttattgtgatttctcttgaatttactttattgtttttatcgattacaaaaacgtattttttatcctgaatttcgtaagtcgctttttgagggattacaatggcatttttaagcggaacaatcatctgaacctgtcctgtttctccatttctaagcaattttcctgaattagggaaacgtgctctgaacgcaatatttccggtttcattattaaattcgctttcgataacttctacatttcctttttctttaaaagtttcaccgttagccaaaaccaaacttactctgttatcagcgcggtcttttacatcggtttgatactgcagatattccggttctgaaacattgaaataagcaaacatctgactgttgtctgaaagacttgtcatcaattcaccttcatcaataaggcttcctaattttaatggaatacgatcgatagttccgtcaaacggcgctctgatttctgtaaatgacaaatgaagttttgccaatgctacttcggcttttgcagattgcaattttgcctgtgctacacttaattcgttcttagaaacgatatttttatctgccagtaatttggcattttgaagttctatttctactgatttttgttcagcttgtgcttttagtaattctgcctgatacatattgggcataattttaaacaacagctgtcctttttttacaaattgtccttcatccacaaagatgttttgtaaaaaacctttttcctgagcacggatctcaatgttacgtactgatttgatttgtgaaacgtactgtttcgtaaacgaagtgtctatttttaccggattggtaacaacaaatttttctacttcttctttttcttcttttttagttgtacaactagttaggcacaccagggcaattaagcctgtgaacaagataattcttttcatgattttaatggaaattaagcgattgagtgcttggaatacagtgattcctttagatgaaaaaatgcatcaggtgcccttagtcagaacttaactttcatataagatgaagtagcaaaaaaatacatcaacaaaatatgcagatcacaacttaggcaaccgatgtatatattgttgaatcaaattcttagtactcgttgagtaatgtagataggatttgagttgccaaagaatggcaggaagattttaaaacgattataatcgtttgcagcagtttgactggtagcaaaggaaagataccaactgtcaagtaagctgtagtttgttgcgaacaaatgattggaaagaccacctttaagatcatcacttcccacgcattcttcttcagtatcacagtccgcatcttctatgatcgaactgccctgatcctgattggtgaatttcacacggtgtcttttctcaagatgatgagaatgagagtctttaggagtacccgcattaagatattgccctccgccaagcagaagcaaattcataaatactaaaaagactattaactttctcatttggttgcgaaagtaaggaaagtatcgaaagaaaaaaagatttttttataagctttaacatttattaaaatacgaaaacgttttcaggattttattgcactcaaattatgattaaaagttgtgctttcttatcaaaaaatcataaaaaattgagtctgattcagaatcaaatggataacattttaaaaaccagcaaaaaaacatcaaaatcacaaatacatgaggatatagattttacgattaaaagtgcattttaatttttaaattaaaacttccattatggtaaattcctgtccggcttttgtaaaaatctgccctgtatcctgcatgcccaatttctcataaaaagcttttttgttaactctggcgttacaccaaacttttttcaatttcttttcttttgctaattgcaaaatatattttataagctcagaaccaatgcctttcccctgacattcttctagtgtcgccagctttctgaactgcatttcgtcatcactgatgaaacaggaaacaattgaaaccaacttatcctgcacaaacacgccaaagtgtaatcctaaagcatcttcttctaactgtacaaattcaaacggctgatcgggccacattacttcatgcctgatcagccaggtctccgaagctaatattgttttgattttcattgttttgcttattactccagattaattactcttttacacacaaagatatttcataaaaacaaaaaagggaatctaagttgattcccttttttactattctacttttatataaaatcgctctgtattattgtcggttattttttcaatacctccatctcccttcttagcaacattaataacatgcaattcgtttccatttatggtgcaattccaaactgtaccatcagataaaataatgtccgaaaacaatgcatctgatttctctttgttgtaatacactaatttttcagacttgataagttttttttcctgcgttttcttatttttctcatacgaagagatttcattatccttgatctcaattaattcctcaaaatctttctgagaagctgcattgttttgattagcagcccaaaccggcttatctccaaccatcttccaggtaccaatggcctgctttaaaagatgttctctcaaaactgttcttaaggtatctacttttttaatcgattcctgacctatttcattatcaggtttaattttaaaggcaatataaaataaatcaatcgctttcttataatccgctttttcgtagtagtctaaagctaattcgtatctgcttttctgaaatgcgattttaggattgttttgggcaaagcttttaaaagagattaataaaacaataaaaaatagtttctttttcattaataatgtaggttttcattttttttgcaaacgtagttttttaatagcagacttccacatcctttttaactttttttaatgcaaaaattaagatttaacttacagatagtcagggtgaaaattcaataactctgcctctcttatatttaccgccactttttaccattttaccctaatttagactgaaaataaatttaaaacctccatagccttgtctgtgtcttttttagccacaaagatatgatcgtggtaaaaagcagccacaacattacagcttattccattctcagaaagtgcctttgaaaatgctgctgtcaaaccaactgcttctaatgatgaatgcaccgtgagtgtgatccaggacattacaactgagtaatccagttttaaggtatctgccgtttcttttttcaaaatcagagtaattgcttcattttctttgaacaacattacaatatcttccatagctatgttctccatcttttctactttacagaaaacataatctcctaaattatgctgaggtttcatgcttttaagcaatttttccaaatctttttctcctgacattttaagtttttgttaaatcggttattttagtttttccagcttttcctttgcttccgaaaaatttttatccaacagcagcgtcttttcataactggcaattgcatttttcttatctccattagcttcataaaaatctccaagggaatcatacacatttggactttgaggataattggcaacatttaacctgaacagataacctgccagctccatatcttttttacccaaagactggtagccatatgcattaatggtattttcaggaacattaacggtataacctaagtgttttgagacattttggaagtgcttttcaatcttagtaaacaccgctttattaaagttaaactgttccgtaatggaaagttttaactgattgaacttaaatagaaaacgcagaccatcatagattgcgatcaatggtacagatccgtgattatcatcgctgtaatactggtactcataattcagattactctttttattgttctccaaaaaatcattgaaatctaaaatggagcggatatgtttggtaagaagtgttgtatcttttctaactttttcaatattcatcccctcatccatagtatttgcagccgccataaataaggaaacttttgacaggtttttattggctaattttttcttcgtatctgctaaaaacttctgacgatcccaccacaaacttggatcgatcgcaatataagagtgaaataaatccgtatgattagccagaatattcaaggctgtcaaccctccaaaagaatgtccaatcaaagttttaaaaggtgctgtggggtatttaccgtcgatatacggaatcaattctttctgaagaaattcaacaaatttttctcctcccccagactgatcactcaggctttggggtacaaacgggggatcaacctccgaatgggttggggttaaatcccgattcctattggtgtttgttatacccactataatcatttcaggacaatttgtgtttccgttcacttcgctcatttcttcaattatcccaacaacggagctaaaatgtccctctgcatcgagtaaataaacgaccgggtacttttgctttgctaaaccagtatttcgggcacttttaggaagatgaatccatatttttctattttcattcaaaattttagacgaaatactatctatggttcctatttcaattctatttttattttgagcaaatgccaaactcgttgacaatacaaataaactgaagaagagtatcttttttccaaaaacaatttgtagactattcatttcttatggactttttcaattcgttactaaaaattcaaaacttattgtgctgcttttataaaacacagaagtcgtctttttagttaaaaaaaaacgacttctgtggtattcttttatcttcctgaccaggtattgtcggcaggagtggcatccataaaaataccaccatctagaactacttttttaatttgcttgctgctcttcactgtaactgcggccagtttttgattcgcctgccaaacagctggtgtgctatgaactgtttctgtcgtattatctgcgtaggtcacaatggcatcaaacggaatggcaaaaccaccaacattggcaacagaaataacattcttagccacctttttaacggaaagatctaagtaattattcgtgaaaaaccaattatcaaaaaaccaattcaaatttttacccgaagctgtattgatcgaattaaaataatcccatggaaccgggtgtttaccattccaattgtccatataggcatgcaatgcttttttaaacaaatcatcacccaacaagtcttttaaagccaggtaagacaaagaagcttttccgtatgaattattgccgtaacctgaatctgataactgtgacgacatcgtgatgataggctgatcttcttctgtagacgggtcatttatatattgctctactcgaaattctttataaaacttatcggcagcttcttttccatgctccgcgattcctatcaaatattcaaaagttgtcgcccagccttcgtccataaaagcataacgcgtttcgttgattcccatataaaaaggaaaataggtatgagctacttcatgatcctgaaccaattgtgcaaaaacaggatctcccatttgcgaatcattgcacatcattggatattccatatctgcaaagccctgaaaagccgtcattttagaatacggatagggaactcccggccaattgtgtgaaaagaaatccaaagcatattggttgtacttaatcgaattttcaaaatcggttccttttacatcataagctgcttggatactggcacgtcgctttgtttttttatccacaattacacttccggcatcccataaataatgatcacttaagccaaaacacacatctgtaatgtttttagcttcaaatttccaaacgttccaatcgctttgttttgttaccaaaccgcttttcatttcctgctcattggcaatgtgtaaaatttcatctgttacgtatgatttttttaaacgtgcagcaaattcaggctgtaagacctcatccggattcaataaatctcctgttccgtaaaccacataatttttaggtgcttttacagaatacgtataatcattaaaatcattataaaactcctgacctgaagtatgaggcaggttatcccatttgttgtaatcatcaaaaacagaaacacgaggataactataggctacaaaaaaagtcgtgttgtcgatttgcccctctctcccgctcacttctgatagcggataattccaatcgatatcaattgtaattttactatgaggcggcaaaggtttcttcatttttacgctcccaactgtaccccagctttttgcatcttctttgtaaacttcgccttcgattttcaaatttgtaattgtcaatccttctgtaaaaaaaccttcgctatttaataccgctcgtggcgaagtttttttatgaatattattcacaaatctaattcgcaaatttcttaacgtatcattactgttgttttcatacacgatcgtttcggtcccgctaactacttttgtattggcatctacagtcaaagccatgtcatatttaccatgattttgccaataatttttcccgggttttccatccatagaacgaacaccgttcgtataagattctttaatatttcttggcatgtaaagttcctgtgcaaaactattttgtgctaaaaacaaaaacgctataaatagcaattgaagtgattttttttccataacttgttttaagattttggtggtttgattgattatagtagttagatgacatttttagctttaagttacattattcaaaaaatttatttctaaaaataaacaataaagttaaaacctcaatcacgcagaaaatcaaagacttaaaaagaaaataaaaaccgtccaattcaaaaagaaaaagacggcctctacaattaatatataaccttggaaactacaaaatataatcggtattaataaaattcgattccctgctgtttagcaattcctgcaaaatttcattgttataagcgatatcttttgaagccacaaacgtacgaatagagaaagaacgcaaggcatccggaatacttaaagttcctacagcagaatctttacgccccgtaaacgggaaggcatcagggccacgctgacaagaactgttgaggtttactctgcatactaaatttactaaggcatcaataagcggtgccaaagttttaatatcttttccaaaaagactcacctgttgtccgtaattcgattcggccatatcttcaagcggctcgttgatatctttgaaagaaataatgggaaccaccggtccaaactgctcttcatgatacacgcgcatttctttgtttacgggatacaaaactgccggaaaaatataattttcactatgcttcccacctttttcattcaatacttttgcgcccttatgtagggcatcatcaattaagccctgaatgtattttggcttgtccgtttccggaagcggtgttaaagaaactcctttttcccaaggatttccaaatgccagaccgtctaccttttcagcaaaacgtttattgaattcttccgcaatagattcatgtacgtacagaacttttaatgccgtgcaacgttgtccgttaaaagataaagttcctgcaatacattcctgaatcgccagatctaaatcggcatcgggtaaaataatagcaggattcttcgcttccagacctaaaatcaaacgcagtctgtttttatttggatgctgatcctgtaatgctatggccgatttactgtttccaattagtgccaaaacgtcaatttttcccgacttcataataggcgaagctacttctcggccgcggccgtaaacaatattaatgactcctttcggaaaactgcttctgaacgcttccagcaaaggcgaaatacataaaacaccatgttttgcaggtttaaaaatcacagtgtttcccataattaaagcaggaatcaacaatgaaaaagtctcattcaaaggatagttataaggtccaaggcacaaaactaccccaagtggcccacgacgaatcatcgcatttacaccctgtactttttcaaaatgagaactacgtccgttcagttctttataactatcaatggtatcctgaatatattcaacggttctgtcaaattctttttgcgaatcgcccagattctttccaatttcccacattaaaagtttcaccacctcttcgcgggtttccttcatctgttttacgaaattttccatgcatttaatacggtcaaccaccttcatcgttggccataaaccctgacctttgttgtaagcggtattggcagcttccactacttcagcagcctctttctcttccataaacggaatcgatcctaataaagttggtgtgtatttttcggttgaggaaatggtcgaaaaaaccggggttgtctgtcccgtccatggttttaattctccatttacaagataagtatcttgattgatcaaatttttaatttgaaattcttcgggtattaaactcataatttggtctgttatagtttggttattaatagcatttgaaaaagaaaaaagaggctttataggcctcttcttctctcttatgggtttacggtttcaccttcccaatccagaattccaccaagcaaattgtaggcattactaatccctaactcattcataatctgacatgctttggcacttctggcaccagaacggcaatacacataataatttttgtttttatcaagctcttcgatttcataaataaacccttgtcctttattaatgtcgatgtttacggcattttcaatatagccgtcattaaattcgtcttcagttcttacgtccagtataactgcattctcgtcagcagtcagctgattaacccaatcttcttgtgataaattcatagtaaatgtgtttttgtaaaattacgacgtttctattgattaaaaacgtgccaaatgcgatttcgattattattctcagaaaacgttttagagaaagtactataatcagtgaaaagcaaatttacttactatttttaaaaatatagtctataaattcgatagaaaataggattttttcatttacacaaaacacctcttaaatataattttctgataatttataccattgcaatcccttatctttgtaataaattatagattttaattttaatttaataaaaatgttctttgaataaaattgtaggtaaaagcctctaaaagtggcgtgaaatgagttagaaaagatggatttaagagactaaaaaatgtgtttttgattaaaaatgagacatttgttcatttaacatccctttagttttaatgcataaaaagcaaactaaaaaaaatactatctttaccgatcaaacgtttatgaacttaagtcgcatttttgcgacactacatatataattatggcatgtacaagttgttcaacctcagatggtggtgcaccaaagggttgtaaaaataatgggacttgcggcaccgatagctgcaataaattgacggtttttgactggctcgcaaacatgagtccgtccaatggagaggcgatttttgattgtgttgaggttcgttttaaaaacggacgcaaagaattctttagaaattcagaaaaattaacgttaagtattggtgatattgtagcaactgttgcttcaccgggacatgatattggaattgtaactttgacaggagaattggtaaaaattcaaatgaagaaaaaaggagtaaatcctgaaagcaatgaagttcctaaaatttacagaaaagcttcacagaaagatatcgatatctggtctgtagcacgtgatcgtgaagaaccaatgaaagttcgtgcacgtgaattggcgattcagcataaactggaaatgaaaatttctgacattgaattccagggagacgggtcgaaagctacgttttattacacggcaaatgacagagtcgatttcagacttttgattaaagattttgctaaagaattcagtaccagagtcgaaatgaaacaggttggtttccgtcaggaggcagcccgtttgggaggaattggttcttgcggacgtgaactctgctgttcaacctggttaaccgattttagaagtgtgaatacttcggcagcacgttaccaacagctttcactgaatcctcaaaagttggccggacaatgcggaaaactaaaatgctgtttgaactatgagttagatacttacatggatgcgctaaaagactttccggattacgataccaaattggtaaccgaaaaaggagatgctatttgccagaaacaagatatttttaaaggcctgatgtggtttgcgtataccaataattttgcgaactggcatgttttaaaaatcgatcaggtaaaagaaattattgccgaaaacaaacaaaaaaacaaagtttcttcactggaagattttgctattgaggtaacttctgaacctgagaaagactttaacaatgcaatggggcaggagagtttaacccgttttgatcagccaaaaagaaagaaaaagccaagtcgtaaacgcaaaccaaatgcggagaatgcagttgtggctgctccgaacaaaccgcagcaagccaataataatacaaacaagccggctggtggcaatccgaataaatcgaataaaccacaaaacaaacaaaatcaatcgaacaaacccaaaaattcgaacgatagaaagccagccgagccaagaaaacctataattattactaaaaatgagaataaaaagtagtggaattcttcttttgtcagcaatactccttttttcctgcgataaaaaaagagtattcgacgaatacaaatctgttggaagtgcctggaacaaagacagtattgtaacctttgatttaccggttttagattcgaccaaaagatacaacctgtttgtaaatttgagagacaacaacaattatccgttcaataatttgtttttgatcgtagctatcgaaacaccaagcggttttaccaaagtggatactttagaatatcaaatggcaaatcccgacggtagcctgatggggaatggctttacagacattaaagaaagtaagcttttttacaaagaaaacgtaaagtttagagggaaatacaaagtacatgtcaaacaagcagtcagagaatcagggaaaattccgggagttcagactttagaaggtattacagatgttggttttagaatagaacaaaaagattagaaaaatagttatggctgctaagaaaaacaatcaatccaatagcgttaaagatattaattactacaaaaagaagttctggagaatttttgcctatagtttattaggagttctcgccttctttttatttgcctcatggggcttattcggttcaatgccttcttttgaagatttggagaatccggattctaatttggccaccgaaatcatttcgtccgacggagtggtaataggtaagtactttaaaaccaacaggtcacagcttaaatattctgatttgccaaaaaatctggtagatgctttagtggcaacagaagatgcccgtttttatgagcattccggaattgacggtcgagggactttacgtgctgctttttctttggggacaaatggaggagccagtaccataacacagcaattggcaaaacagttatttcatcgtggtggatctagctttttaccctttaggatagtgcaaaaaataaaagaatggattattgccattcgtctggaaagacaatataccaaaaatgagattttagcgatgtactgcaacgtttatgatttcggaaattatgctgttggggtaagttcggcagctcagacctatttttccaaagaccctaaagacttaactattgacgaatcggcaattttagttggtatgtttaacaattcatctctttataatcctttgcgtaaccctgttggggtaaaaaaccgtcgtgatgttgtactgggacaaatggtaaaagccaagatgataacgaagtctcaaaaagagaaatatcaggcattgccaatcgctttaaaattcaaattagaaagtcaccgtgaaggaaccgctacttactttagagagtaccttcgtgattacatgaaaaaatgggtggctgagaataaaaaacccgacggtaccgattacgatatttacaaagatggtttgaaaatttacaccactatcgattccagaatgcagcttcatgcagaagaagcggtttcggaacacatgaaaaacttgcaacagcaattttttattgaaatgaaaaccaataaaaatgcgccgtttgtaaacattacacaagcagaaacagaccgtatcatcatgcaggcgatgaagaattcgacgcgttgggctcttatgaaagagatggataaaagtgatgaagacatcattgcttcgtttaaagtgaagactaaaatgcgtgtattcacctggaaaggagaacgtgataccgtgatgacaccacttgattctattcgttatttcaaacacttcctgcaatctggtttaatggcgatggaacctcaaaccggaaacattaaagcatgggtaggtgggattaattataaatatttccaatacgatcacgtagggcagggagcacgacaggtaggatctacgttcaaaccgtttgtttatgcaaccgctattgagcaattaaacatgtctccttgcgattctattctagacggaccttttatgattcacaaagggcgtcacaatgttactgctgactgggaaccaagaaactcagataacagataccgtggaatggtaactctaaaacaaggtcttgccaattcgatcaatacagtatcggctaagttaattgacagaacaggtcctgaagctgtagtagagttaacacacaaattgggtgtaaaaaccgaaatccctgctcagccctctattgcacttggtgccgtagatattacagtggaagatatggtggctgcctacagtacattcgccaatcagggagtatatgtaaaaccgcaatttttaagccgtatagagaacaaaagcggagaggtgatctatgagccaattccggaatctcatgacgttttaaacaaagatattgcctttgccgtaattaaattattagaaggagttacagaaactggttcaggtgcacgtttgcgtacagaaggcggaggaagcggtgacaatcgttggaccggatacccgtacatgttcagaaaccctattgccggtaaaaccggaaccactcaaaatcagtcagacggttggtttatgggaatggtgccaaatcttgtcaccggagtttgggtaggttgtgaagaccgttcagcacgttttaaaagtttgacttacggacaaggagctacagccgcattaccaatttgggggtatttcatgaaattgtgttatgccgacccgggattacaggtatcaaaatccgagtttgagcgtccggcaaacctttctataaaggtagattgctacagcagaccggcagtggtaaaagatacgacacaaacggaccaaaatacagacgaattcgaactgtaggtttagttcttttagaatagtaaatccttttgtaatcttctgaaacagaagattacaaaaggatttctttttttaatgatgtagtctgccgctcagcaggcatgcgagcagttcgttttcaaagaataaaatcagtcattttattttttacgaaatcgttataatttaatctaaaaatcttatttttatcaaaaatatacagtaataaagacagtttgttatgattacaaaaaaagtaaataacgttcaggaggctatcgaaggaattgaaagcggaatgactataatgttcggaggtttcggtttatgcggaattcctgaaaatacaattgcagcattggtaaatacttccatttcagatttaacctgtatttcgaataatgcaggagttgatgattttggtttgggattgcttttgcaaaagaagcaaattaaaaaaatgatttcctcttatgtgggggagaatgccgagtttgagcgtcagatgctctcaggagaactggaagtcgaattgactccgcaaggtactttagccgaacgttgtcgtgcggctcaggccggaattcctgcgttctttacacctgcaggttacggaactgaagttgccgaaggcaaagaagtacgtgagttcaatggaaaaatgcacatcatggaacaggctttcaatgcggagtttgctattgttaaagcctggaaaggtgacgaagcaggaaacctgatttttaaaggaacagccagaaacttcaacgcctgtatggcaggtgcaggtaaaattaccatcgccgaagtggaagaattagttccggtaggaacattagatccaaatcaaatacacattccgggaattatggtgcaacggatctttcagggagaaaagtttgagaaaagaatcgagcagagaacggtaagacaaagagcataattagagaattagaaaatgtgataattggataattatttggattgcgtacctattttgcattatctaattatctaatttccaaattgacacattaaaactatgttaacaaaagaagatattgcaagacgtattgcaaaagaagtaaaagaccgctattttgtgaaccttggaattggtattccaactctggtagcaaattatgtgagagaagatattgctgtggagtttcaaagtgagaacggtgttcttggcatgggacctttcccttttgccggagaagaagatgcagatattatcaatgccggaaagcaaactattacaacacttccgggagccagtttctttgattcggcctttagtttcgggatgatccgaagccaaaaggtagatttgaccattttaggtgctatggaggtttctgaaaatggagatattgccaattggaaaattccgggtaagatggtaaaaggaatgggaggtgcaatggatttggtagcttctgccgaaaacattattgttgccatgatgcacgttaataaagcaggtgaatctaaaatactaaaaaaatgctctttacccttaactggtgtgggctgtgttaaaaaagtagtcaccgagcttgcggttctggaagtaactgataaaggttttaagctactagaaagagcaccgggtgtttctgttgagcacatcatcgcatcaaccgaagctgatttgatcattgaaggtgaaattcatgaaatggatatcagataattctgtaattaagataaattcgcatgaaggctagcttttaaaagggctggccttttttgtaggaaaaaattaaagaagaggcaccgggtttgcttttttctaaaagccttgtatttgctgacttttgtgtgttaatgtgttagttatcagtagaataattattttttaggcctgttttttgtgaaatcatcacagtttgttaaataaaagtaaatttaaagtaaaaaacgttgtatttaatcgattaacggcaaatttcatcgattatttaactaaaatgaaatacttttattttaaaatagagtatttacttacgtttaatattttatttgtaatccatttaaccaaactaaataccacattattatgaacagaaaattaccaaaaagcatggcgtcagccgttgttattcttacattttcagtgtcaggatttgcccaaaacacagacaaacgggtaagccagaagaatgtatccgaaaatggacaaccaagcttaatcacttttagtgataaatctacttacagaggaaccgattacaacactgtctttaaagaacaattgggtttaaaagacaatcaatccttttctaaaattaagatcgaatctgatagagaaggttttacacatgaaaaatttcaattgtacgagcagggtattaaagtagaatttgccaattacactttacattccaaagacggaaaactagtttccatgaatggagagttttatgctcttcaaaatgtaaaaacaaccccaaaattatccaataaagcagctttcgatagagcggttgcttatacaggagcaaaacaatatctgtgggaaaacctgcaagatgctgcagcaatgaactatgagaagccaaaaggcgaattggttttattgccggcaatggaagaacagggggaaaccagaaagtcagataaggtgaggctggcttataaatttgatatttatgccactaatccggtaagtcgcggagatctttatatcgatgcagaaaccggaaaagtcctgttttataacgctaccataaaacaccttggtgaatacagccacggaaataaagtaaaaaccgccaaagcaatacatcaaaaagaggatgcgactgcaaaaaaagcttttgttgcagccaatgccgcgacacgttacagcggaacgcaggtaatacaaactaccttaagcggagcgtcctatatacttgctgatgcgacaagaggtttgggaatcaacacctacaatatgaaaaagggaaccagttatacagcagccgtaaattttacggatgccgataataactggaccgctgctgagtataacaatgcgaacaaagataatggagctttggatgcacattggggagctgaaaaaacatacgattactggtcaacagtgcatggcagaaacagctttgataacgcaggagcaattataaaaagctacgtacattacagcaatgcctacgataacgcttactggaacggtagtgtaatgacttacggtgatggaagcggaacttatttcgatatcctgactgctattgatgttgcaggacacgaaataggacatgctgtttgtacttatacagccaacctggcgtatcaaaaagaatccggagcgatgaacgaggcgttctctgatatttggggagcctgtattgaatatgcagcagcaccaacaaaatcgatctggttaattggtgaagatatcgaaagaagatcagggcacctttctttgcgctcaatgagtgatccaaattctgaaggtcagccggacacttatggcggaacctattggatcaatccaaattgtacaccaacaagcagtaacgattattgcggtgtgcataccaactccggtgtattgaaccattggttttacattctgtctgtgggtaaatcaggtacaaatgatattggaaatgcctataacgtaacggggattacaattgataaagcggctaaaattgcgtaccgtttggaaagtgtctatttaacagcaaattctacttttgccaatgcaagaacttcaggaatacaatcggctattgatttgtatggtgccggttcaccggaagttattgctaccaccaatgcattttatgctgtaggtgttggagctgcgtatgtggactcaaatgatacaactgcgccaacagcgccaacaaatcttgctgcttccggaacaacggggtcaacaactaatttaacatggactgcttcaacagataatgtaggggttactgggtatgatatttaccagggaacaactctaaaaggttcgtctactacaaccaattataccgtaacaggtttaacagcattgacggcatatagctttagcgtaaaagccaaagacggagcaggaaatgtttcaacagcaagtaatgtggtaaatgttacgactacagcggcttctttaaattactgtaactctcaggggaacagtactgtagatgagagaattggaaaagtggtattcggtaccatcaacaatacttcaacaggaacaaccggttatgaaaactatactgctatctctacaaatgctgccaaaggaacagcctatacgataacaatcactccagtttggacatctactatttacagcgaaggttatgctatttttatcgattacaaccaagatggggattttacagatgcaggtgaaacagtttggacgaaagcgacctctacagcggctacagctacaggaaccatcacaattccggctactgcaacacttggtacaacaagacttagagtttctatgaaatacaacggaataccaacttcttgtgaatcattttcttatggacaagtagaagattattcgatcaatatcacagcttcaggagctattgtaaatcaggaaattgtagcaggattagtggaaactaatgaaacggcaagatttgcattgtatccaaatccggttgttgatgaattgaacatttcgttagcagataatacaggatatactttcagaattacaaatacattggggcaacaagtgagttcaggagccctttcaggaaatcctattgatgtgagaactttaaaaacaggactttatgttatcgagttgaataatggtgctaaaagaatcgttaagaaattcgccaaaaaataaaaatgttaatttaaagaacgaaagaccccgcaatttgcgggttttttttatgaagttctcaaatgtaatttttgtatatcacagttagaccgctttttgtaagtttgtttgttcagtaatcctaaaaaaaatcatgatgaaattgtacttattgttttttttgtatgccattagttttagtagtttttctcagaacaacgtgctggtttttcagtccgattttgggttgaaagatggagcagtatcagcaatgaaaggtgtggcaataggagtttcaacagatttaaaaatatttgatctgacccacgaaattccggcatacaatatttgggaggccgcgtatcgcttgtcacaagccgcacagtactatcctgcaggaactgtatttgtatctgtttgtgatccgggagtgggaaccgcaagacattctgtagttttactcaccaaatcaggacattattttgtgactcccgataacggaaccttgactttaattgcagaacaacttgggattcaggaaattcgcgaaattgatgaagtacaaaaccgtcgccaaaattcaaatgaatcgtatacctttcatggacgcgatgtatatgcttttaccggagcacgtttagcttcaaaaacgattacatttgaagaagtaggacctaagctgcctaatgaagtggtgaaaattgattatcagaaaccggttttagaaaatggagttattaagggcggtattccggttttggatattcaatatggaaatgtatggacaaatatcgataaaaagaccgctgaaaaattaggcttgaaagcgggagatgtcgtgagagttcaggtttttaatggtgctgaaaaagtatacgaaggaaaactaaagttagtaaatacatttggtgaagcagtaattggtacagctgtttgttacttcaacagtcttttaaacttctcgattgcagtcaatcaggggaatttttcagaaaagtataaagtgtttagcggagctcattggagtattttgctaagcagataaaataaaaaaccgcccatctaggcggttttttgactttatggattttgctctcggacaatttcagaggaaatacggctttaaataaaacttgtattttcttatccgttgcgcttactgtaaattgaatgaagctcctaaactaaaagttgcctgattgtttaaatgatcaaatacatccttgttgtttccgtattttgcaattggaaatccaatctctgtgaaaacaccaaatccgtccgtaaagaaataacgtccgccaacatgacctccaaagttgcgcaatcctaaacttaaaccagggtaaatatccaattgtttaaccccgatgacactgcttaggttagcattaattctggctttagcatcaaaacggtcactaaagtcaggttttaaatcagtgtatggagttggattgttatgatagaaaccattaaagttgtctactcctaataaataattggctacaaagccaaaagagaaattttctccaagaccaaaatctaccgaaccctgaattccagaaccgccattttgtatgttagcaccaacactcactttaatatctccttttcctttaaaagcctcttgtgcttgtgtgaatccaaatgatactaaaaacaaaagtgtaattacctttttcataaatataaattttaattattttttaaagtgcaaaaatagtatttttaggagttaattcctacctttttcagagaaatacagttcatttaacggttcgctctgccagaaatctttagtgtcgacgtttaaaatagtcaacgggcctttaaaagcggcaccagtatcaacgttccatatatttgctttttgtacaggtgttgtttcgccaattcgggtcacaggagtatgtccgatatagatttctttatacaacgtaaaacgcttaggataaagtacatcaccgatttttaaagtaggatctaacgaaagagccgtttcccaaagtgttctgtcccaatagaataattttggaaaatattcatatttgacgccattcagattggtaaaacctgcgtgaacaaataatcggttttgatcgtcaaggtaatagtcttccaatgattcgaggaaagcgatatgtgtctgtttttcttccgtactcagtttttcgtaagccagaacagtcgcttcaccaccatgtttgaaccataaagtttcgtcaacgtcttctgttttgcttttaaaccaggacaaaagcagttcatcgtgatttcctctgatgcaaatgcaattttgcttactttttaagtccattaaatattcaattacttgcggagattggctccatccgtcaacataatcgcctaaaaaaataagagtatcttgtgtggtaactttggcttttttcatcacttgttcaagcgcgagtaatccgccgtgtatgtcgcctataacaaatgttcgcattttaattctttaatgtagaaatacaaaaataacgaaaaggattcgtttgagactattaacttgagaatctttacaaagggtgtgatttgaattgttatatgtgaaatgtgagatgtggaatgtaaaatgtgaaatttggaatttggaatttggaatttgagatttggaatgaattttaaggggttatttttatgattattttcgacgcattttgtgcctttcctctttaaatttgtagtatgtctgaaacgcctacatatcgaaaaatcattcatattgatatggatgctttttatgcttcagtagagcagatggataatcccgctttgcgcggaaaacctgttgctgttggcggatcggagaatagaggcgtagtctcggctgcgagttacgaagcgcgaaagtttggtgtacgaagtgccataagtggtgttctggccaaaaaatattgtccggaaattattttcgttcgtccgcgatttgagcgttacaaagagatctcgaataaaattcataaaatatttcatgactacaccgatctggttgaacctctttcgctggacgaagcttatcttgatgtgacacaaaacaagaaaggcaacccaagcgcaagtttgcttgcacaggaaattagactccgaattttgaatgaagtagggctcacggcctctgcgggaatttcgattaataagtttgtagcgaaaattgcatcggatgttaacaaaccaaatggacagaaaaccgttaatccggacgaggttttaagctttttggaagaactgcccattcggaagttttatggtgttggaaaagtgaccaccgaaaaaatgtaccaattgggaatctttacaggagcagatcttaagagcaaagaagtagcgtttttggagaaacatttcggaaaatcgggggctttttattacaatgtggttcgcggaattcataatagtgaagtaaaagcgtctcgtgtaactaagtcagttgcggcagagcacaccttcgatgtcaacttatcctctgaaatttttatgctcgaacagcttgaaaagattgcagcatctttagaaaaacgattaaaaaagtataacatctcgggtaagaccgtgacgcttaaaatcaaatacagcgattttacgcaacaaacacgcagtaaaacgctgccatactttatttccgataaaagtttgattttagagactgtagaggagcttctgtatcaggaacgaatgaaagattcggttcgattgcttggcatttctctgaacaatctaaatacagaagaaaaaaaggcagtagtagtacaacttaaattttccttctaattgcattaaggaataattaaatcatgtaatttgttcttttatgatgaattttctttctacctttgagagtaacagtacattaacattgaatcattcacaatgaaaacgaataaatttgaagaagtttctcatcgtaattcagtccctattatggcttgggattttcattgtgaacatttaaaagaattaaaagcgattcttacggatgtaaagaaagtgaataaaatttcgactcagtttatctgggacgctaaaaatctggaaattgaagaacggataaaaaatgaagtagttctggttaccgatttggatttgaagatcgtttttgcttcaaatggaatcagaaaaatgacaggttataaggaagaagaagttttgggtaaaactccgaagatgtttcagggaccggcaacttcaaaagtagtacttaaagaaataaaagaagccattcagcaacgaattccttttgaaaaaacaattgaaaactacagaaaagatggcagaacttataaatgtaaaatcaatgcacttcctgtttttaatttaaaaggacagttgtcgcatttcattgctttcgaaagtgaagaattgggctaaggttctaagattctgaggtactaagacgcaaaggttcaaaggataatacttagtaaaaacaaaaccgccctaaggcggttttttattgtttaagaagacttagaatcttagtatctcagtaccttagaaccttagtctacagattttcaaaaaaatcatttcctttatcatccgtaataataaaagccgggaaatctttaacggtaattttacgaaccgcttccattcctaattcttcaaaatctacgacttcaacttttaggatgttgtcttgtgctaaaatagcggcaggacctccaatagaacctagatagaatccgccatattttttacaggcatctgttacctgtttggtacggtttcctttggccagcatgatcatactgcctccatgtttttgaaactcgtctacataaacgtccatacgtcccgcagtggtcggtccaaaacttcctgaagccattccttcgggtgtttttgcaggtccggcgtaataaacaggatgatttttaaagtactccggcatcggtttaccagcttccaataattccatgattttggcatgtgcaatatcacgggctacaattacagttccgttaagttttaaacgggttttaattggatattgagataatttggccagaatatcggccatcggctgatctaaatcaatttcaacaggcgcttctaagtgcggggctgtttccggtaaaaattgctttggatttacttccaattgttccacgaagattccgtctttggtaatcttccctttaatatttctgtcggctgaacaagaaactcccaatccaaccggacaagaagctgcgtgacgaggcaaacgaattacacgaacgtcatgcgtgaaatattttccaccaaactgagcaccaatagcactttcctgacagattttctgaacacgctcttcccattctaaatcacgaaacgcctgaccggccatatttcctgaagttggcaggttgtcataataaccggcagaggctttttttacagcacttagatttgcttccgcagaagttcctccaattactaaagccaggtgatacggaggacaagccgatgttcctaaatctttgattttcgtacggatgaaagcatccatagatttatcatttaataaagattttgtttgttggtacaagtaggttttattcgcagagccgccaccttttgccatgaataaaaactcgtaagaagctccttttttggcgtagatatcaatttgcgccggaagatttgagcctgaatttttttcttcaaacatcgaaatcggaacaatttgagaataacgaaggttgcgcttttgatacgtattgaaaattcctctgcttaaccattcagcatcatcaacacctgtaaaaatgctttcccctttttttgccattacaatagccgttccggtatcctgacagcttggtaactgaccttcggcagcaacagatgcattttgcaataaattataagctacaaaacgatcgttatctgtagcttctggatcgtcaagaatatttcttaatttttgtaaatgcgttgttctaagcatgaacgaaacatccgtaagggcttcttcagccaataattctaatccttttgggtcaacagttaaaacttcacgttgtccaaattgctctacttttacaaaatcggaagtgattttgcggtattgcgtatcatccttcaaaataggataagggtcctggtatataaaatcaatcattgttttgttttttacaaagttagaaattatttacctaagaaagaatttgaataaggtccgtttttgatcctttatttttgactgtggaattcatcaaaactcatttttttctcaaaataggtttggttttccttggtaagcagctgcttttgccactgatttccaatcaagcgaaaaatcgttgaatcggagtatttaacagttcccatattctcgtcattgtcatcgggttcaaagaaaactgttttgcagtaaaaggaatccggatccgtttttgcagaaggatttccgaattcaacccagccgccccagccactatcggacatgcttgaccattcgtgaaccaattgtatgtttttatttttcagataatataaatagttgttctgactataaccgcaagcaggatatccaaaactaagatgaacaaacggagagtttttagttgcggctgaagtcagtccaagagaagctccccattctgaacctttttcgatccctttaatcgagatttttgaagaaacagttttggttttattttgataaaaatcaagttggtaatttccggttatgatactgtctttatctgccttttggctgataagatgcgcaagaatatagctgtttgctgagatttcttcctcatcgctgattgttatggtatccgtttttaagaatttttctttagcgggaattgcattttcaactttgttttcagaatggacacctactatctgcgattcggattttggtttttgacaggctattaaaagcgataaaagaaaaaggtattgtggcttcatggtttgttattttttaggctttgattaaatggctcttattttaatatggtttttttattgatcaacggattaaaatccgttgctacaaaataggtcattcctacggaatttttaatctttaagaaagtgccttcggctcgaccaatattgtagggccggattttaatccggtttaaaaatattcgacaatggggtttaaagatccatcggatcggtttatatttttaggttttgcgaaagatcgcatttaatatgtttcgttcctatggaactttttgaattatggttttttcattgatcaacggattaaaatccgttgctacaaaataggtcattcctacggaatttgtaatttttaagaaagtgccttcggctcgaccaatattgtagggccggattttaatccggtttaaaaatattcgataaggggatttaaagatccatcagatcggtttatatttttaggttttgtaaagtatagcattttaatatgtttcgttcctatggaactttttgaattatggttgtttcattgatcaacggattaaaatccgttgctacaaaataggtcattcctacggaatttgtaatctttaagaaagagccttgggctcgaccaatattgtagggccggattttaatccggtttaaaaaatattcgacaacgaggtttaaagatccatcggatcggttcatatttttaggttttgcaaaagatcgcatttaatatgtttcgttcctatggaactttttgaattatggtcgttttatcgatcaacggattgaaatccgttgctacaaaataccccattcctacggaattttacaatctttgatcacgagacttcggatcggttcatataagatcattaaatagatatttttcatcataagaaacctgaaatctctctaaaaatgtaaaatactcttctttgaaagattgctttttgtggtgttcttcctgattttgaatatatttatataccgcatcaacatgtgattggctgtaggagaaaacaccgtaaccttcctgccattcgaatctggattttgtcagtttatggtcattgatatattttgatgatttcgcttttatggttttcattagttcagaaattgaaacatttggttttaaacccagaaagcaatgaacgtgattttcggtaccatttacaattatggttttgcatcctgtttcgtttatcagatgaccaagaatacttaataatttcgatttccattcgctattaataagtgcttctctgtatttgacagcaaaaacggcctgtatataaacttgatgataggtgtttgccattttgcgtattttgtattatagaagcaataatacaaaatatttctatgcgtaattaataaaaaaataagaaaaatactattttttattaagctttaaaaaaaccagctggctacaaaaatggcggcgattacacatataaaatcaaccaataacatggtggtaagtgcatatcgggtgtttttaatgtttaccgatccaaagtaaaccgcaatcacataaaaagtagtttcggcactacattggaaaatactgcttaaacgcccggtaagcgaatctgctccgaaagtactcatagaatccagtaagaatcctctggaacctcctgagctaaaaggtctaagtaatgcaaccggtaacgcatttatgatttcggaacttacgccgatactgctaaagataaatccgattccgttactgataatctcaaacagtccgctatttctaaaaagggaaatggcaaccagcattcccaaaacgtaaggaaagattttaactccggtttttaaaccattgtttgcaccatcaacaaaagtatcgaacattgtagtgtcttgtgctacaaatttcttctcatgaatgaaggaaaaaatgagagtaattccaatgatcccaaccaacatcaatcctgaaagattagaagtaaaatagttttttccaattaaatccaagtgattaacgtagaacaataatcctatgatcgcagcaataatggccattaaagcaagtactaatgaagcacttttgaaatttattttttgtctgactcccacaatcaggaatgctgcgacagttccaattaatgaagtaatgatacatggaagcataacatccgccggattggctgcatttgctgcggcgcgatatccaataattgaagttggaatcagggtcagacccgatgcatgcagacacataaacatgatttgggcatcacttgctttgtctttttcgacatttaattcctgtaaactctccatcgcttttagtccaaatggtgtggcagcagaatctaaaccaaggaagtttgctgcaaaatttaaggtcatatacgatatcgaaggatgatttttgggtaccgtagggaacactttggtaaacatcggacttaagaatctggccagtttttcggaagctccggaaacgattaaaagttccattaatccgcagaaaaaggctaagtaggcaattaatggaataataatgtcgatcaaagtacttttacaggtaggcagtaaaccgtctgatttttgtacaccgctataaatttttaccgttttgtttttgtaaacataagtagtatcaggatttgttaagtccctgtttacaatcatggttttatcttcttttaaatcgatgctgtctctcacaaaagcaggaatctgctccagatatttttcagaaaccagaattgggtcatctttttgtccgttcaaaataaaatcgagtgtataactgttgccggtaaacaaactcactaccacaaataaaattgaagacacaaaaatagctaaccaaaatctgctcaataccataattatatttttttgtaaatgtaattatttaaccctaaaacgcgcaaggattttaaacaggaaacaggaagtatttcattgaaagtaattcggttttgtgaaaattcaaattattcgatttgaattttggtttctaaatagttttcaaaaggcttaatgccttcaaaaagaattgcctttttatgattttcagtctcgttaaaaaattgggtttctattttggcgtgatcttttttgatggtccgtttccaggttccgatgactttgctgttctccaggattatgggtttgaaaatgccattgttggtaaaagcctttggttgatgctcgggtaagatggaggcttcacgggatttataggaaattaagatttcatcaaaagccggaagaaaatggatgctttcgcggaaattatcctcagttgaaatatcatttttgaaccaatacttctgatcctcaatggtaatagtatttaattgcaattcgattgcattaatgatgtttttgcagctggtaggagagaagcctgaccaccatgaaaagtcaagaagggtagcagggccatggctttcaaagtatcgaagggctagttttgtcaaaccttcctcttgggttagtctgccttgtggtttcggaaccctttcttcaagtaaagcatacgtcatttgttttccgttcatttttccgttacaaaccaaaccatcaagttcagcatacatcataatggcaccgcttaaatgatcagggccaggagttttagtaatgctaagttcctgcatgatttcttcacgggtgagatgattgtttcctgcaagtattttttggatagcggcattcgtttgatgtagtttcttagtatcataaccatatttttttacgtaagaggttacaatgcgtttgacttgcggccctgaaagatccaacatccagtaaatatcatcggcagaaacaaaatgccaggtaggccgtaaaatatgagttcggataatttgtgccgaattgatagcttcttcaatcgctttttctgaagcatcgcaacgggagccaactgcccattttgccattgcatagtcctgagcctgcattgcccctaaatgctgcacaatttcttgtggtgcattgtcagtcgttttatgaagtttttgagagatgagcctgagctgagctatttttgaatccatcgtttaaagcggtattacacatgaataatttcatcgtcaattaataaatcttcacgacgcaggcgaagaaaaatctgagctacagctatggtgtctttctcacaataggttacaattcggtcaatgtctttttcgacataaaagacatgtgcaacctgactgccgtcgatatcaccttttggagagggaactcccaggatcttggttaatagttttaaggaggtaaagtgcttgtaatcgccaaacttccataattctaaagtatctaaatgtggtatttcccaaggtttttttccaaataaattaagcttgtccggaattgcaatctggttgatgatcatacgtcgtgcaataaacggaatatcaaattctttggcattgtgtccgcacagcaggtgctgcggtttattgaaatgattgttgatcagattattgaagtcgcgcaggattttcttttcatctccaaaaaaagaggttactctaaaatttctgatatcacctttaatggtaaaatagccaaccgaaatacagacaatcttaccgaattctgcccagattccggcacgttcataaaattcttcgggagtaaaatcgtctttacgctggtattgtgtcttctgatcccaaagagacctcatttcttcgtcaagcgaattgaaattctcctcttccggtaccgtttcaatatcaaggaaaagaatgttgttaaggttaattttttcaatcattatggtgacgtcttatattttttggcatttagatttataaatgtacgcaaatgattctaaaaataagaaatagcttatatttttaagattttgatacttttttgtcttccgctttcgtaaaggtatgacttgttcaaaagctaaaacaaactctgctgcgtactaggattctcatgttccaacagccatttcttacgggaaagaccaccggcgtaacccgttaaagaaccattggtaccaataacacggtgacagggaaccacaatccacagtgggtttttaccatttgccgacgcaacagcccgaatagcttttagatctcccagtttcttggtctgatccatgtagctgatggtttttccgtacggaatttccaacaaggatttccaaactttttgctggaagtccgttccttttgggtttagttttaaatcgaagtcggttcttttaccatcaaaatactcttgaagctgtgaaacggccttttccaaaactttaggaatggtttgtgaaacgtcattatcgccaacatcagaaacagagacaatagcaatgccgttttcatctccaacgattttggtaattcctaatggtgaattgacataaactgtttccatagttttaaacgtaaagttttagcgcaaaggcgcaaaggtttatcgcaaagttcgcaaagttttttttaaatgatataagttatggcggtaatttaagtttggggtgttttaccagcctcctccgccaccgccaccgccgccgcctccggaacttccgccgccagaacttccactgcttgatgacgaggaggtataagttttgttaaaatgaaccaatgttcggtaagaaaaacccggagatccgtcgctggctgttatccatttactggtataatttaaattttttaatgcagctgcaaattttaggttccactctttatcaatgtctaaagcaaaagcataaggcaggttttcttcataaatacgaacagtatcggtattttgttctacaggatattttagtaaatgttgcttgaacttcttggtttgaaatttagttttaattcccaatttggtataagcgttaattaaattaaaataaatggtaaatccggaaatgataatcaataataccagtgcatttaatgccgaataacttttatccgcagtatttgcaataagaagtgtataagttacaagcaaaggaaaaatcaatacaaacaaacacggcaacgcaattgcaaattcacctcttataaatgatttgacaataactttgattaataatacggtaagtactaaaaagacaaaaccaaatattgcttcccaaaagattgttccttttgcaatgtaacaatagcccaatagagctacaattgttaaagcaaaaccaagtagaatttgttttacattgttgcgaaaataatcatcggtattgtgttgattttcaatagatttttgaagttctgattcagcgtccttaaagattttgtaggttttagaatcgattgcaaaattatcattttctttaaataaggattttaagacagcattttcttctggggctagatggtctggttttgatccttttttcagaaagtatttaaattcgtctgcccaattttgttttccgttatcagtaatttcgattgctcctttaacggagagactaataatcgaaaccaaaagtgttttgttattaatatatcgttcttttaaatatcttaaagaagagggggaatatcgttcccttatatcttcaagttgattgctttcatttgtgggtaaaggatctttgccgtattttttccaggaataaaagtagaatacaaaacaaatacaaagcgcgaataatgctatagccagtttttcaacagataaaaactcttccattttaaagtgtgctaagaaaaatggttgatctacaattcctttcggaaatcccactgcaacagtaaaaccttcctcggattttaaatttttagaagtaaaataaaccgaattgccgatgattttggcattgcaatcgtttgctttagagcctaaaattccagtatagcaatgtgtttgaagtgccgttgctccttttggcagaattactcttgcgctaacattatcgatgtcgaaaacccagtagttaccagtgacattccaataaacttcatcaaaatcagaataggaatgaatttgagcttcaacttcataaatcaatttataagtgtaaaccccctttggaagaaaagaatctttatcaccaatgtaaattgtaaaattttgcagatcagatttagtgtgatacggttcgattcttccatttttgatcacctttaaaatcgtataaaaattgttgaaaggaacttttgatgaactatttgtcaacggcaattctctaaaaataccatgatctatttgtaaacctgcgctataaaccctaattgtttcagttataatgatattcccgttttctttaattaggatatcggcatgaaattgttgtattttttcggtttgttcttcctgatagacagctgtagaatccgtttgactaaaacatggagataatgaaaataataaaatactgaaagtgaatacaaacctaaaatatgttaccatgaaagaagttcttttgcggagtgaaaataagaattgtgtttttaaataaggtaatttatgtgaggcaataaacgtccatttcaaattgataattcaaaacagattccatttttttacttgaaataatcttttgaatgtttgagttttcagttctaaatttcggaggattcagattgtgttcttttgctttttgagtgtagtattcttctcttgttggatgaaaaggtgctacggcattaaagacctcgttccatttagcctgatttaggattgcttcgataatggcgatacaatcgttttgatggatcagatttatcggtgcatcagggttttcaaggttttcttttccggccagaaattttaccggatgacgatcttctccgattagaccgccaaaacgcaatatggtggctgcaaagttttgattcttttgaagcaaagcttccgctaaaagcaattgtttaccactttcggtttccggatttgggagtgtatcttctgtgatcgtcgtgttctcattcccataaactgcggttgaacttacaaaaagaactttttttaccgttgatttttctataaacggaatcagattcttcatttttcgaacaaatatcctctcagacggagtcggaagactggcgcttttttctcgtaatttaggcggtatatcaataatcagaatctcactttccgccaggaagttagtgatgctgtttgaaacatattcgctttcaagcgcaaccagaaagggatttatgcctgatgcttttaaaatagtaagtttactttcagaagttgtcgatccgtttaccgaatgtccttctttaattagctttttcgccagaggccatcccagccagccacatcctaaaatactgatttgtgtcatttttcgtttaaagttgcaaagataaagcctttcgtagcgggaaagaattaaaaccagtatttacctgatttttttacctctttgcgggattaaaatattagagatccaaagtaaatcgcactttgtcttttccttttgcgcccattcggtgatagaatttgacggctctttcgttaaattgcggggtttgccattgcatattgacgcaattgttttcttttccaatttgttttagcttttcaatcagtatttcgccaataccaaaacttctggcctcttcttcgagaaacaaacagtccatataaagaaaatttgcggcattccaggtggagaagtcaaaagtaaaggaagcataacctacaatcgtatcttttgttgcaaccaccaggcaatgtacttttggacgatcgccaaacaaggcttcttttaacttattttcttttccttccgaagaaaactgaactttttcatactccgcatgtttttggcataaaaccactagttttggtaagtctgaaggttcacagtttcttattgaatattccattgaagattgatttcgttttgtaaaaaagtgatgaagcgataaaagtagtccggatattcctgattttcccgaatcgcaataaagtgttttctttttaaaccgttttttccaatttgtatagcttttatcggattgtttttcaaatgaggtaacaaggcccattttgccattgatattacacccatatcggccttgaccatttcgagcgatgcttctgtaagcggcagggcagttatttttctgggggttaccttggcgggggccagtacaaactgatgtatggtaaccgtttccatcggaaaggagtgaatgagtaaatgttcgtcgataaaatctttggctaccacatattttttagttgcccaggcgtggttttcagagactgccataaccatttcatcctgaaaaagctcaatatatctaatgttgttgtctttgatctgatcgcttattacggcaatatcgatggtgttttccagtaatttttgtatcggaatatgggttgcttcggttacaattttaagttcgacgtttggatataaaaaatgaaattgttttaaaaccgatggcagccaatgataacttgaaaaacattcggtgctaattctgatttcaccgtattctccataaaccatttgtttgatttgcaattcggtttgcaaaagtttgtccaaaatttcattggcaagttcgtagatcttttcgccggctttggttagaaccagttttttattggtgcgcagaaaaatggcggttcccaattgatactcggcttctttaagctgatggctcaaagccgattgtgtcagatgcaacttgtcaattgccttagtgatgcttccttcttcaacaattgcttttattaatcgtaaatgacgtatttccatttttttgggaattagaagtacaaaggaacaaaattttaggatggcttttctatgaaaaaaagtaatcaactgaatgaattcttttcgtttttatgggaggagccattacattacatttgaaaaactaaaatagtaaaactgtaaaaaaatggaagcacaaattaaacattacgagaataagctggcgttcgaaatagatccgtctgatttatttgatgccctgaacaatggagagaaagtaatcgctattgatgcgcgcaaagcttttggctttgaagcagaacacattcccacagcaatcaatattccgcatcgtgaaatgacgctggagcgtacccaacatttagacaaagaagttttgtatgtaacttattgtgatggaattggctgcaatgcttcgacaaagggcgccttgaatatgacaaaactcggctttaaggtgaaagagttaataggagggatcgagtggtggaagttggacggttatgccactgagggaacaaaagggggacagacaggtttgagaatggaatgcgcctgttgaaataataaagggcaaactttatataaagtttgccctttattattttaaaattcattttacgattcgattaaagcttttaaagcttgtaaaattgggttttcttcatcctgaggtttttcctgaactgctccggggcgattgtcttcctgaacaatttcgagttttgttttctgattttcttctgttaagacataactcactacgaagtaattctcgggtttgtcctctaattccggtctggggaagaataaggaatatttgattttctgattggggataatctccaaaacagtcccccattgctcaaaaacctgaccttcccattcgttcctaaatctgatttcattaccaattttccagtctgtgattaagtcactgccgtattgccattgtttgacccactccggttgagtgagtgcattccagactttttctgagggagcatttaaaagaactgtagagatattggttgccataataagtgttttttattgtggttttacaattggctttgcaataggttttaagctgtctttttttaggatagtactgtctttcgctattgctgcaggtgcaggaacagttgcgggtgctgtgtagcgttttattttttgctgaaggagtactgcgtcattcaatacaaaaggtgttggcatcatccaatcgcttcttggttttactttaagcagcggattggtcatcaaatcaaaagaactttcaattaaatccatatccagaacggtcaatttgttggtgtagaattccatgataagaggttcattgcctaccacatagtaacataagattttcatgccatcgcgttccagacgatttcctttttgtcctgaagctgcaactccattagctttgaaattgaaaaaagtcatttttggattggcataaatatcataacgatttacctttctgtttggggtgatttttatttttaaatacctgttattgccaaccacactgtcttttaaaaatgcaatagttggtttcggtatgtcgactacaggagcaatcgcactatacgtaaagcccgaattgtatttgctggctattggtaatgtatttaaaccaatagcgctctggtttttttgacctaaataagttttggtccaatcgtcaaggttaacatcgtaagttgcccaaagagcagagttggtattggcattgtaaacgtacagtaaactgtttgattttgcttttcctggttcgtaatcggagtggtatcctgcatagataaaaaagccaattgaaacagcaaagaaaaagatcgtccagatcccttttttagcaaacgtaccaaatatcggtaataccaatgtaaaaagtaatacggttagaatagcacttacaaagaggatttttaatcctaaaccaaccggaaacattacaataaatggagcgatgataacgaatgccggaatgctaaaaaggaggttgagtccgaggctataatgttgagtaagaacaaaaattccgaacaggagtatgccgaagtataccggtatgatcagaaaacctgcaccagtcagactattagctacaaatgcattcatgatgatccagagtagcaacggtgctacaaaatgattcatggtaattttagcttctgaaaaatgatggtagaaggcaaatgaaatggcgatactgagtgttacaaatgcaccgatataagcatgaccgttgtatgtgaatccattcaataagtcagaatattgcggataaatctgtaatacaattttccatcctaaaaaggttaccagacccgctatgattagagatcctaataaaggaacaaatcctttgaatatttctctgaaagtgataacacgtttaacctttcctataaagatgaaaacaatcaacaatcctaaagcaataattgtcattggccatacccatgaaaaaggatagttaatgaaggagaacggagcagtaaagtacacatcatcctctgttgaagttgtagtatttaaatctacattggaaaaatattttaataagggcattaagtaagttccctgatgagccaaagttgttttgttcaggtgctgaacatcatcttgttgtgtgtgataattgtagtgaccgtctataaaagcaaagttgaatccctgaatgtttccttgctctctgaaaaccgttaagtcggtatcatttggaagcattttgtagatgctgtacataagtgaattggaaacaggataagtagtttttgcattagaaaattcttttaccaatgctttgtttcctttattggtttccattaacatataacttggacctgaggatcctcttgcctcaaaattaagaaccaaacctacatcttttgcccacggatggctgtttacaaaaagagccgcaccatttaaccccagttcttcagcatctgaaaaaagaatgataatgtcatttttatgcggttgttttgcatacaaaaaagcacgaattccttcgagaatagttgcaacacctgaagcgtcatcacttgccccttttgaaaaagaatgcggagcactgtcgtaatgggaaagaagtaaaagtgcctttgtattgttggtaccctttatgcgggcaagaatgttttttgattttacaagaagtcctctatcatttaaagtaaagccttcctgaacactggtttccaaaccaatttggttcagttcaagtttaagataattggctacgagttcatgattgagagaacctacatagtgcggtttctgcgcaataattctgacttgatttaaagctctgtccgtagaaaactcagcaagagcctcatctcctttagagattacctgcggcatcattgtggcgtatataataccaagaatggcaagaatgcaaactatggctagaattgaggtttggttttttttcatggtagataggtactataattcttttttaacaagcataaaataatcattatccaaagagcgatatccctggtcgtacagaaaatagtaggtgtttcctgttttggtctgcaagatattggtaaagaaatcgaaatcaaaacctttgtttgtcattttatcccttgttgctttagatttcccgttagggtttagttcgctcaaaattcggtaattttttcgtaatttattgtttacattacgcatgaaattcgtactgtctttgtttattttattattgtaagcatttcgacagctgtctgagcagaatttcttgtcttccctgcctacaattttttcggagcattcgaggcatgttttcatgaatctatctttttaatttcgtacaaatcggttcttcgatcttttaacgtgcgtacacttccatgttcgtgaagttgtttcagcaggttgagatcaacatcaactattagagtcatttctgtatttggtgttgcttcggcttttattccattactcggaaaagcaaaatcagaaggggtaaaaacagaggcctgagcatattgaatgtccatattgtttactttcgggaggttgcccacacagccggcaatagcgacataacattcattttcgatggcacgtgcctgcgagcagtgtttcactctggtgtaggcgttttgagtatcggttaaaaaaggcacgaacaaaatgttcattccctcgttggccataattcttgaaagctccggaaattcaacatcatagcagatcagaatgccgatttttccgcaatcagtatcaaaagttttaaactgagagccgcctttcattccccaatgctgtacttcattgggagttacatggattttagtatagatctccgaagttccgtctcttttgcaaagaaaaccaacattgtaaaggtttccattgtccagataaggcatgcttccggtaatgatattgatattgtatgaaatagcaaattcctgaaaacgctttcggatagggtctgaatatcgggccagttcccgaatggcttcggcttcagataaatgattgtaatcggccattaaaggagctataaaaagctcgggaaacaaagcaaaatcacttccgtaacccgaaacgacatcaataaaaaattcggcctgctcgaaaaattcttcaatattgttcagcggacgcatttgccattgaatcagtcccaaacggatgacacttttttcgaggttaattagttttggactttcatcgtaatacacattgttccattctaaaagtaccgcaaactctttcgactcttcgtcaccttcaaggtagtttttaataattcgcaatacatggaagtcattacttaactgaaacgaaagtaccggatcgtgcagttctttatgttttaccttgtcgatatagttttttggagtaagctttttagaatgctgggcatagtttggaattctgccggcaaaaacgatggctttcagatttaactgttcgcaaagctcttttcgggcatcgtataaacgccggccgagacgtaaaccgcgatagttagggtgaataaaaacatcgattccatagaggatctctgcatttttattatgggtagaaaaagtatggtttcctgttgcttgtttgtaattgtgtcttttgtcgattagcttttcatcgacaattaaggataaggccgatccaacgacttttccatctgccagtatgacgagctgcccttcaggaaaaatagaaagtagtcttttaatatcgtcctctttccagtacgaatctgccatctcgggataggattctaccatagaatcttttagctgcttgtagtcgtcaaattccaaattacgcaattcaactttattgatttttgtctgcatatcgtaagatttatctcaaatatacgaaataaattccatttacaaacggttacaaatagttacaaccgaaagtaaatagttgtctaccggataattgctggcgttcgtcggatctttgtcctgttgaatttgatgaacgaattcattttatactaacatttaaatattatacgccatgaatgcaatgaaaaacagagtacagttaattgggaacgtaggaaacgatccggaaattaaaacattagaaaacggtagaaaattagcgtatttgaatatcgctaccaatgaaaagtatactaatgacaaaggagaaaaaatcgaacaaaccgaatggcatcgtgttacagcctggggcaaaacagccgaaataatcgaaaagtttgtagtgaaaggtaaagaaattgctgttgaaggcaaactgactcaccgaagctacgatgacaaaaatggtgaaaaaagatatgtaacggaagtagtcgtaaatgaaattttattattgaagtaaatatagtactatttgatactcaaccctacaggttttcaaaacctgtagggttgagtatttttagtaagtaagggttttagaggatagaaactccgttaatatctgtcgttaatatttcactcatataatcaaaaaagggtctcatatttttaaaagtagtgagagcctgttccagaaaaagaggactcagaacttcctcatccgtaaaacgtttgataagcagaaacgatttgaatcggagcaaatctatcgcttcatggtttatgtcgtagcccttgggagccgttttaagttgttctccctgcaaagtcccaaaagtgctaataaaagattctgactggagtattttctgcatggcttgagagtcgtgaccaaattcggctcggatgcgtttgagatctgctgcatttggtccccaaaaaccgccggccagaaaactatttcctttttcgagatgaaaatagtaaccgccgcgtctttcttttgttgctctggtataactgcctccccaaaaggttttaaaaggagttttgtctttagaaaagcgaatgtcacgatagattctgtaaacgctttttttgccggaagctgtttccagtacatctgttttagagagttcctgaagcaaagcacctgcaaaggtttcaatatgatttagctcgattagatattcgggcttatgtatctcaaaccagggcttgttattgttttctttaagcagagataaaaaatcaagactggatttgggtatagtaatgtcgtttttcatagatgaactgaatgaatcgtaaaaaatttgggattaattttaaccgtaaggaatgcaatggagaaaagcaaagttacgcaaagatttaagtattgtgcgagtcaattgtaaaagttaagattttcttctgcattgtaatacagatgatgcgaattcgtttcatgcgtgttctattgttttgggatcaatctcaagagttgggaaaaaaagggctgaaagccctaaaaagcaacagcatcttgcgcagcactatgaattaggttaaggtgcagaattgccctgaaagggcaaaagcaaactatacattataagtttcaataaagaatcaaccgctcttttataaagtataattcaaaatgatataaatccaacttttgtgcataagcttctgccctttcagggcgtaaccgatattcgttatcgttgctcatagtgctgcgcaccattttattgctaaagctctttcagagcaatatttccaaaattaaaaaacccaccaaatggtgggtttgtatatttcgttaagcagtttttttgaataaatcaaacataggacaacgcgagcaacgtttcttttcgctttttttgtatttctcacaacaagaggatttgcagttttccaacctcttaatgttctcaaggatagcagctttattcttctttttcttcttatccttttttttgtccttgtctttttctttcttgctcaattttcctctgtattataaaaacagaggcaaatataaaagaaaaaagttatttttaaatattctaaataaactttaactttttttattttgggttgatagcgatcgaacttgtaaccgttaattgttgaatatcacggtcgaacaagtatagtccgcctttgtcatctccaattaagttgattttatctaagattgacttagcagtcgcttcttcttcgatttgttcagaaacataccattgtaagaaattatgtgttgcataatctttttcttcaaaagtaatgtgtaccaattcgttgattgattttgaaacaaaaagttcatggttgtaaagttcctcaaacatttctttgaaagtagaatacgatgttttaggtgctttcaaatcggtaatatgagagtgacctccgcgttcgtttacatactttattaactttagcatgtgtgcgcgctcttcgtctgactgtgtgtacataaattgcgcaattccttccagtccgtgtacttcagcccaacaagccatagaaaggtaggtttgcgaagattctgcctctatgcggatttgcttgtttaaagctatttcgatattttttgataacataatatttctcttttgtgtaaagttagagaaaataatccattcccttttttttcaaacctgaaaacatcagacatttggattaattctcaataaaattaaggtctttcaaatgaaaatggtttcgaaaatacagccttatcgatgatcgggttttgtgtttcattttccggaaatccatcggtaaattttcgcatctgatattgttttaaagcagtatcgtaatatcctaaaatataataatcgtcaaatctaaaaatgttgtccagaatcgcttttctattattgtttaaaaagtaatacaagttgtcaagcgccattggtgcaggatctttggcaacaaattctgatttttggtttaaagccgtttcaaaaaatacggtttcatcattcacaaccggcaaataatcccaggtaaaagtatcgttcatgaccgtatagtaagcgccgccaacacgtggagttccaccgagtgtcatagaagtactaattccattgttataaagtgataaacctatttctaaagcagcgagatgttgtagaaaacgtttcgtattctttaattcccgtggttttctttcaccgccttgctgaacgaggaaaggtgaggttttaaatcgaatcgtatcttcctttgtaactctgatattttttataagttcgcccgaatcataatttttaatgtcaagaaccagttcatcttcattggcattgatttgataaagcttcttttcatgatagaaggagttgcttattttgcgaggggttttaatctcagattggacaattttcttttcaataacgtcctgattctccagattgagatcaaaaagccgtgtttctttcgcattatgatccagcgtcagaataagatgattgtcttcgagataaattttactttttttggaggctttgtctaaaggcgtataatcttccggatcaatttttataattggattctctttgatgagctgtgaaaaacttaccgactggcctcttttgttttgaaaggtaaaaggagcaaaatcaaatatccgctcttctacaattccgtttttaaaaacataggccgttaaagtatgacttgtgagttctttagacaacaggtagagtagattgttgctttgaaacttagctacgatatattcgctcgcggaagggaacagaaattttaaaatcttatacgtcttggtttccaaataatatttgatcacaaaaatttccgaagattcttcggaagcccaataaagtgttggatttccgtcttcactaaaactataacccaatatcgatttgttttcaagattggcacgtgatattgtaaattcgtcctttaaaaataaagcactattgtatcttaaaatagtaagattctgagtatttgtggcaaaaacaaatacatcgtgtgttgccttattttcgacattaacgattgtattgttctgatcgtacctctttaaatctaaaggataagaagccaaaactgtctgactcaacagggtcgactgataggttactaataagagaaggagtagttttttcatatgcttttatcgacaaaaattattccaaatttaaacctcttgtgtgcgaattattgattcattaattcctgaaaataatccacaaattgtcccatgtgtaatccatccattaaggcgtgatgcacatgaacagacatggcaatggttctttttccggttggtgaaaccatcatttttccgaaagaaacctttgggcagctgtccggaaaggtaaaactgcgggcatgtgaaagtgacgtaaagttcaaccacggaattgccgagaagtgaattaaattatcattttcaaaagaccttgtaaaaagtcccgtggtattctgaatgcgttctatttcctgtaaagccgttttttcgaaggttttaaaatcaggatgatattctataaatgaaaatccgaaagtgccatcttcacgtccgatggttgctgaggcatcgatttggtcattgatgtaaatctgatctcccgaaattcggtatctaaaattttcgattgcatttacggcaaccagtgttttgtgcaaataataaataaaaaaggaggattcgagacttttggccttttcgtaggcctgcgtacaatcaatctcgacggtagcaccaaaaaagggttcttccatttgaatgaagtgtgcaaagtgttcttttctattccagttttctaagtctaaaagtgttttcattacaataagttctgaaggatttcagtgattttttcaaacgaactaaaatgttcgtgttctattttgtgactgattttttcatgctcccaagtggtgtgaaacggaatatgtaccgcataaccgccaatgcctaaaaccggtagtacatctgattttaaggagttcccgatcatcaggaattcctctgcctgaatgtctaaacgccctaatagcttcgtgtaatcaatttcctgtttgtctgacattacttcgatatggtgaaaataatgacccaatcctgagcgatgcaatttgctgtgttggtctttcagatcgccttttgtggctacaaccaatttgtactttccgtgtagtgtttttagggtttcttcgacgccgtcaagcaattcaataggtttctcgagtagttcttttccgtattggatgattttttcgataacctcaattggaatggtattgttggagattgtcattgcagcttcgatcatcgacaaaatatagcctttgattccgtaaccgtacagagacaggttctcaatttcgattttgaatagttcctgcgaaattccctgatgcgaaaggtaatcttccatcaaagcgcaaaatttatgctcggtttcctgaaagtaaggttcgttgacaaataaggtatcatcggcatcaaatgcgattacttttaagttggggattttgtttttatgtaacataatgtttttgtttcaggtttgaagtttttcttgtttcaggttttttttgccacgaattcacgaattttcttgccacagattagaatgatttcaaagattttaaaaaataatctgccagatcagctaaatctgcgagagtattttttcgccacgaattcacgaattttcttgccacagattagaatgatttcaaagattttaaaaaaaatctgccagatcagctaaatctgcgagagtatttttttagccacgaattcacgaattattttttacaatcggtctgtgccatctgcgtgagaattcttcagccgcgaatttcacgaatatgcacgaatttttattttactgccgcagattagaatgatttcaaagatttcaaaaaaatccgctcgatctgttaaatctgcgagagtattttttcgccacgaattcacgaattttcttgccacagattagaatgatttcaaagattttaaaaaaaatctgccagatcagccaaatctgcgagaatattttttttgccacgaattcacgaattttattgccgcagtttaaaaaaatctgccagatctgctaaatctgcgtgaaaccttttattacgaattcacgaatttaatgatttagatgaataaataatctgcgaaaatctgtaaaaccagcgtcatccgcgggccaatgacttagaaaagcttttttaatgagatcgtcttatcatagaacgtaattctaattccgaacagcaaaatgattccgccgaaaaccatttgtaaagttatttgttcttctaaaaacaaccaagctaatatcgaagtaattacggcctgacttaataaacttaatgaaactcttgtggcgcgcatgtgctgggtagcataactgatggaaagccaggcacacaattgacaaattacagcctgaagtgccagtacaaaccaacccgtattcgagaaacctgcaaaaggctgatccagcgcataacatagaattcctaaataaatactcgatgccagtaagctgatagtcataaaagataaaacatcgatttctgagagtgcttttttgctcaccaaaagataaatcgaataaagaatacccgataaaacggcaaacagaaaggcctgatcaaaattcaaatccatgaaaaattcaaatcccaccagcgtgaccattccgaataaggaaacgacagttccgatccagaaattggttgcaggtctgatttttagaaagaaaaaggaaccaattccaacccaaagcggtgataaattagttaacaaagatgcctgagttgcacttgaatcctgaatagcaatattccaaacagcaacatccgaagagaacagaattccgcaaagtactgctaatagtatgaatttggttttcggaagcttaaagcttttagtaaccagtacataaggtaaaagcaagagtaccgcaaaaaacattctgtaaaaagccgagattaatcccggagccagttttagtttgactaatattggaaaaatcgaaatacaaagtattccgccaatcagggctaatcttggtttggtgagtttcatttaatctaaatattgaatcggaaagtgggtttttgctaagatctcacttttttcttgaataagaatcaaattattgatttttgtaaagtttttaaaagagaaacgcgtgaatcgattaccaatttcacgcgtttaagagagtgtttaagctgtagcaatttcactgcaggcctgtgctatttgttgatccgagaaaggatcaagtgcctgggccagcattttaatggttttcatacagcttatcattttagtgcgcagctcctggttgtcaccaatctctgtttccagaattgcctcgaaaatctcggacaaatattccggttgttctctaaattctccttccatccaaagaaaggaaagaaattttgccaccgctggcagtacatcttgttgtgctggtttttgattttctttagtcatagggttgtttttataacttatgaataagttgttagaatttccccgggatatttttgcagtagtaaacttatgaaaaaaaagtaatggaaaacgctgattagtattgaatttcgtatagttttgtattgaaagaattttaacctactgtctttttattacaaaacccgacaggttttaaaaacctgtcgggtttataggaattttagtgccgactgttattttacttttctgtttttaatatcctgacgattgtcccaaaatgaaacgatttcaatttgattttcttttacttcataaaatatcaggtagactttcatagaaataacgcgagtggttttatttgaagtaagtctccctatcaattctgagtttgagagcgtgtttaatagatcttcaatctcgtttagaagttttaagctgtaagttgggctttcatttctaatgaaataatactcaagagtattttgtagttgaagtttagccaaagatgaccaaattatttcttttttagccattctctcatttctgaaattacttcgtcatttttatgaaaatttccatttttgatttccattcgactattatcaattgccattttttgatcagcagacaattcataaagttcttgttcagaggaatcgaaaatagtttgaagcgcatttagaaaattcaaatctttagaatctttgattcgggatattaaattcttttttatttgtgcagtcaagtccatgatatttctttatatcctcaaaattaaagatttattctcagattatataaactgattgtgattatttgaacattggtatctaagtaaaacaaacccgacaggttttaaaaacctgtcgggtttataaatttagaaaattatcacattatcaaattgccacattttctaattaaatcaattagtttaccgtttccccattcggagcatcggcatccggattgatgaaaaccagttttccttcggcattggttgtcattaggatcattccctgactttctacaccacgtagggctcttggcgctaaattggctaaaaccgaaacacgttttccgataatttcttccggtgaaaagctttcggcaattcctgaaacgattgtacgaacgtcaattccggtatccactttaaggaccaaaagtttgttggctttaggcattttttcggcttccagaatagttcctacacgaatgtccattttagcaaaatcttcaaactgaataagatctttttgtggttcaggctgtttgctttcggcaagatttgcggtttttgtcgcttccaatttgtctatttgtttttgtatttcttcgtcttctatttttgcaaaaagcaattcggcttcaccaatttgatgtccttcaggaattaattctgaattttcagtaacgtcattccattgcaatttgccttcatttttcaatattcgggataatttagcggcagtaaaaggtaaaaacggctccgccaaaatgctcaacgcagcagcaatttgcaaagcgacatacatttgagtttttacacgctccggattgtctttcattactttccaaggctcttcgtcggctaaatatttatttcctaaacgagccacattcatcaactcacccaaagcttcacggaatctgtaacgctctaccgaacttgaaattacagccggatatgcttttagttcagccaaagtattttcgtcaacttcagataattcatttggttttggaataaatccgtcgtaatatttattagttaaaaccaccacacggttgatgaagtttccgaaaatagcaactaattcgttgttgtttcttgcctggaaatctttccatgtaaaatcgttgtctttggtttccggtgcattcgaagttagggcataacgtaaaacgtcttgtttctccggaaattcttctaaatattcgtgcagccaaactgcccagtttttagaagtcgaaagtttgtttccttccaaattcagaaactcatttgcaggaacgttgtccggtaaaatatagcttccttcggctttaagcatcgccgggaaaatgatacagtgaaaaacaatattgtctttcccgataaaatgaaccagtttagtgtcttcatctttccagtatggctcccagtcttttccttcgcgggctgcccattctttggtagaagagatgtatccgataggagcatcaaaccaaacgtataatttttttccttctgcaccttcaaccggaacatcaattccccagtccaggtcacgcgttacggcacgaggctcaagtccgccgtcaacccatgattttacttgtccgtaaacattcggtttccagtcgtttttatgtccaaccaaaatccattcggttaaaaactcagtatatcgatccaaaggtaaaaaccaatgttttgtttcttttaaaattggcgtttctccggtaattgtcgattttgggttaatcaaatcggtagcattcaatgtcgatccacatttttcacattgatctccataggcttccggattgtcacatttaggacaggttcctaccacaaaacgatcggccagaaactgattggctttggcatcgtataattgttcggttacttcttcaataaaatcgcctttgtcgtacaaggttctaaagaattcagaagccgtatcatgatgaactttagccgaagttctggaataattgtcaaacgaaattccgaaatcagcaaatgattttctaataattccgtcgtatttatcgataacttcttgtggtgtaactccttcttttttggctttcatcgaaattgcaacaccatgttcatcgcttccacaaataaatgcaacgtcttttccctgtaaacgtaaatatctcgaataaatatctgcaggcacgtaaacccccgccaaatgcccaatatgaataggtccgttggtgtaaggtaaggctgccgtgatagtatatctctttggattctgtatcataactcaattttattgagtgcaaaaataagcaatagaattgagattttgttattgcgcggagtttcacagagaaaaagcacagagattcaccgagttttttctcatttcgatcgaagggagacccgagtgatgaggtgttttattgtccggctgagcgaagtcgaagccaggcaatacaattgaacttagcgaatctctgcgaaaaccttcgagtaactttgtgcaataccccataaaatagaaccagtttaaactagcatacccgctaaaatcttcacgatttatttcgcaacctttgtgctcaaaaaaagaacaaaaaagcaattttatgagcaagacaaaacttatcatcaataaaaacggatcgattaaaatagaaggtgacttcgaaatcatggattcagaaggagctgtttacggactacaaggaagatcggcattgggtctttgccgttgcggattatcggcaaacaagcctttttgcgatggcgggcaccgtaataatttcgaacacgagtctaaagcattcgatttaccaccaatgaaaacaaactaagaacttcggttttggttattttttataaggaagctgcatcttaactgatgtggctttttttgttttcatttttagatgatttactaaatatgatcagttatttccttaaaaaagtgtgttatatttacctaaatttttaaaaatataaagaatgaaaaaattggtgaccccattgttgcttttatgttttgttttggctcaggctcaaacacaaaagacggtttcgagtgattggacatccttcaatcaaacgatagaaattcagtctcctgttaaaaagaagtttaaagtaatcgcgtcggtaaaagttgaaagtaccgaacctcaggcctgggcaggagtttgggcaagagttgatactaagaatgaagaggaaggtttttttgataacatgagagacagaccaattaaatcaaacgaatggaaatcttataccgtagaaggaactatcgataaaaatagtaaatcacttagttttggaggtttgtgtttgtataacggtaaattctattttgataaattcgaattgctgatcgagaatgacaaaggtgtttttgaaccgttggcggttttaaacgcaagttttgaaacccctttgaaaaatggtgaaattccgaaatggggtttaggcatttcaaaagaggcaagtgtaaaagtgaaagagtacaaaattactcaggacaaatccagtgctgatggaaagaacagtttgttactggaaggaagcgggattaaacctcgagcagaagcgaagattggaaatgtggaaggagcgtcgccaaaaattggagatatgatatcaatgcttgaagatcttaagtctcgtgtagaaagaacagtgaagaacatgaatcagtacgaaattgattatttacatgacgcagaagccaaccgaattggtgcactggtgatgcatttggccgctgccgaaaagtactatcaggtttttaccttcgaaaacagagattttaatgaagaagaaaagaaacagtggaatgccgctttaaatctggatcagggtggacgagatgaatttaaagggcatgatattcaatattatttagacatctacaatgaagtaagagccaaaacaatttcggagttaaaaaagagagacgatgcctggtttgccgaagttcaaacaaagtatgacatgagtaatcaatattgctggtttcatgttatggaacatcagtcgagtcatctagggcagattttgtttttgaagaaacgtattccgcctcagcaaaaaccaaccttaccaaaggaaattaaaaagtaatagtttcgattttataaaagaggttgtccaaaaagacttagtcaatctctgagaattgcataaatgaaatttgtctccgacaggagtccgaacatttttagtataaaaagggggctgtccatactttggacagcccccttttgtgttttgattttcgggaagatcagattaaacaatatgacttttatggctttgtaatccattttgaaaaacaagtgaaaaatttatgattatattttaggtttttaataaaaacaagtttattgaattggagcggagtaccaatcctataattctgatgcaaagtatgcttcttttagtggacaatatgttactaaagataccgaaaatgaaacctttcagtttagatacaaagccactaacttcagagaagaacaaagcctgagttacataaatgttccaatcgccattcaatttgaaactccgggaactactcaattgtacgttgctgcgggtgctaaagtaggatttgcgatcaaaggatgttatcagagtacctttcaaaaccttactacaagcggttactatccgcaatacaatgtagaattatttaaccctgcgtttgccggttttgcaagtactaatgatgtaaagatcagcgaacaggatttagatactaaagtgtcttactctgctacttttgaaacaggtgtaaaacaaaagattgggaacggaagttcattctatcttggggcttatatcgattatggtctaaataacatctacaataaaaatggagacaaaagtctggtacagtacaatccgggccttcctgtgcagctgcaatacaacagcgtattggattctccatccgtacacaatgtcagactggtttcttacggacttaaactgagatttgctttacgttaattaacaaacaaaaaatcttaaagaactccttttcccgcttgggaaaaattaaaaatcggcttcttctttattggttaattgaccaaacggagtatccttttggaagacattgtatttttgcgcagttgtcagcctgtgtggtaggatccagcctgaatttcttgtaaaatcttttatttgagatttgcccaattcgtctgaatccatctttcctgccaggtgtcagagttgttaatgtaaacaaccgatccgggatttccgttgtaactatttctattcgtcattgtcagcgtataaaatagaagttgttccggtcgttttattgttgtgtatccagatgagatcgtttagttgttcttgtcctgccatttttcataatctctgtcgaaaatagtgcgatagctttcatgggttaggacgtaagaataagctaataatttattccaaatttcatcggtatcatgattggtcacgaaggttattgctttgtacggatttcttttgaacatgccccaaatagtgtctaactatttgggggcagttcaatgatgcagattccctcttttcttattgaaactttattggttaattgaccaaatggaatatccttttggaggacattgtatttttacccatttgtcagcctgtgtggtaggataccagcctgaatttcctgtaaaatcttttatctgagtattggcccaattcgtctgaatccatctttcctgccaggtattagagttattaatgtaaacaaccaatccgggatttccgttgtagccgtttcttctggcgatgtattcgtcattgtcggcgtataaaatagaagttgttccggttgctttattgttgtgtatccagatcagattgtttagtttgtttttgtccagccattcttcataatctctgtaaaaaatagtaggatagccttcatgggtcaggatataagaataagcgagtaatttactccaaatttcatcggtatcatgattggttacgaaggtcactgctttgtacggatttcttttccacatcatgtcatcattcaaaagtgccagattatttccgtcaaaagcatcattcattttatagtaacaagcaaaatcgaatacagagctgttagcattgtttgcccagtcgttcagagtatttacattagaatcccataattcaccaacagaaaatccacctacattcgcattccaggagtttaccacccaagcaccaaaaccttttacataatcgaatctccagccgtcaaatttcatggtatttttataatattttcccactccgtcagctctcagccatagccaatcttgtacatgtgggtttgcgtggcataaatcagggaaaccgccaaatgcgccttcatcattgttaccatagctgtttttataaaaatcgttataattacgagtgaattttcccgaagcaactccgctaaaattagtccaggtgtttgttccggtaaaaggatttgcttccgattgtccaccgctgttgtgattgatcacaatgtctgcgtatacttttaaattctcggcatgtgcgttagtaattaagttaaccagttcggtttttgaaccaaaacgggtttcgacagagccattttggttgtaatctccaaaatcaaaataatctgtagggtcatatcccatagagaaagcaccgttttgtgctttagaagccggaggaagccatatcgaaccaattcctgcgttagaccaggcggttactttactgctcaccgtattccaccaggtccctcccgaaggaacatcccagtaaaaggcctgcatcataacaccgcctccgggattgtctacatattttccggtcgatgatgaattggaagttccggtactaaatggtcttccgttatgatgtgtaacgttaataatttcgaattgttcgctctgagctttagaatctgtttcagtagtttcattttgcgaacacgaacctaagaatgcagtaatcgctgcaatcaggtaaaattgtaaaattggttttttcataattttcgggttggttaaaaaagttaataaagtttgtaattatagttttaagaggtgaaaagagttgttatttataatttatccctctttaaattatcaattacatatctaaagtaggtgttttttgatttcatttgattttacaggaaattagttattcaacgaaaacgttgtagtatggataacttttttagggtaagggagtttaacagcttgagatgtaatagagtatagttatataacccattttttcagggcttaaggatgatttatgccggtttttcggaacccttgaacgagactcagaacttagttcctttgaaaatagagatacatctctataattttttgttaatagtatagccgatagttgtattatgtaattgaattgttatttttgttcgtcataagtcaaaatgaactagatcttaattgtttaatatttcaggaattataggtctgaggtattttttaaatgattttagtttatgacaaattctaaagcaggatctttacattcaaattaaattttaaataatgttattaaaaaaattagcgctaaaaacaattgatttccgatacgtgttgacaatgtgttttttattttttttcaactcaattatttcggcacaagaagttattaaggatacagtagtcagcaaacctgccattacaatgacctccggacagaagttgaaagttgatggtattattgctacagttggagattatattgttttagattcagatattgataaagcatttttagaaatttcagcacagggcggatctacaaaagacattacaagatgtcagatgttagggaagcttttagaagataaactttatgcacatcaggcaattcaggatagtatcgtagtgagtgatgccgaagtaagaagcatgatggacgagcgattgaattatatggtacagcaggtaggggatattaataaagttgtagcctattataaaaagaattctgtagaggagtttaaaacctattttgcagatatcttaaaagaacaaaaattagcgtcagaaatgacaaaaaaaattgttgatgctgtagaaataactcctgaggaagttcgtaacttctttaaaaagattcctaaagaggaattaccgacttttggagctgagatggaagtagcacagattgttgtggagccaaaggtttctaaagaagatgagcagaaggtaattgacagactgaatgcgataaggaaagatgttcttgagggatccagttttgcgacaaaagcagtattgtattcgcaagatcccggatctgcaccaacgggaggtttttataaaatgacacgaaagactccttttgtcaaagaatttaaagatgtagcttttagtttagcacagggagagatttccgaaccttttaaaactactttcggataccatattatcatggttgaaaaaattaaaggacaggaaattgaattacgacatattttgattccgccaacagtttctgaaaatgcattgaaagaagcaaaagaaagaatcactaatgttagaaataagattataaataaagagattactttcgcagaagctgcaagaacagaatctgatgaaaaagagacaagagcaaacggaggaacactggtaaatccaaatactcaggatacccgttttgaactgactaaaatggatccgactttatacggtcaggtttcaaatttgaaagacgacgaaatttcacagccacttttaaatacagacgataaaggaaaaaaaacatataagataatcacagttacgaatagaattgaacaacacgtggctgattatgctaaggactacactaaaattaaagaactggcattgaaagaaaaacagatcacgacaatctcgaaatggtttgatactaaaataaaagatacctatatcaaaattcttggagagtacagagattgtaagtttgtttacaattggctaaaaaaataatttttattaaataaagaaaaagagttagttttatgaattcataatactaactctttttaattttaaaaacatatctaaatgtctgacgtaacagcaattcataatttagttcagaaacgaaacgaattaaaaaacgaaatagcaaaaattattgttggccaggatgccgtagttgaccaaattttactgtgtatattttcaggtggtcatgctcttttgattggtgttccgggcttggcaaaaactttaatgattaatactttgtctcaggctttaggtttagattttaaaagaattcagtttacgccggatttaatgccttcagatattttaggaagtgagattttggatgaaaacagacattttaaattcattaaagggcctattttttccaatatcattttggctgacgagatcaacagaactccgccaaaaacacaagcagctttactggaagccatgcaggagagatcggttaccattgcggggcaaaactataagttagatttaccttattttgtattagctactcaaaacccaattgaacaggaaggaacctatccgttaccggaagcacagttagaccgttttatgtttgctattaagctggagtatccaactttcgaagaagaagttcaggtagtgaagcgtacgacttctgatgctaagacagtcattaacccattattcagtgcacaggaaattattgattttcaacatttgattcgcagaattcccgtagccgataatgtaattgaatatgcagtaactttagtgagtaaaacacgccctgataatgctttgtcgaatgattttgttaaaaattatttagattggggagcaggaccaagagcttcacagaatttaattttagcagcaaaagcccatgcggcttttaatgggaaattctcgccggatattgaagatgtcaaagcagtggcaaccggaattttaagacacagaattattaaaaactataaagcagatgccgaaggaataacggaagaagttattattaaaaaactgatgtaacagattcaataaaaacagcagaaacccaaactagtaatgatctctagtttggtttttttgtttaatttgattttgaggtttcgtttattaaaaaaatgggttggccataaatcaattttataagtaaaacttcaataagagagctgtattttttgccattagattcgtaccaccaatacgatgtataattttggctgtctttctccattttattaaaccatatttcctctttgtttactgcaactttcttagattcaataattttgtatccggagccagtccagcaaaccatcggattatgagagggtgtttttatataagtcagtttctcaggagtttcaattttaaaaacctccttgtttacccaagagcctttttttgtattgtattcaaaactaacttcctggtgaaaactagtttctgtttcatttttgatttttatactggttgctaaaaggagtgtaaaagatacgaatacaataagtattttaggtttgattttgtttgaatcattgttttcggtttttggttttatatacttaataatgaatagcatcggtataatttgataaacggtaaagcagattaaaccaatagcgtgatgcaaaaagttttcctgagtacaattgaaaaaaattaaggttacgattctaaaataattagaggtaatattgagcgctattataagtaagcagaaagagagtatctgaaaaacgccgtaatattgtttaagtcttctttcttcgagagtcattaaaactgcgccaaacaacaatcctgtcttgaacattgacaatcccatgcaggcagtgtcgatggtgatttttgcattattgatgtaaaaattaacaccttcgattttatttataggtataaaattctttagtgtcagataaactatgtagcaaagactttgttttatttcggaggttaagtgtgcaaaaaaagcactaaaaagggtcgaaaataaaacaagacaaatgaaagcaataaaggaaaatttcccagtgaaataatggaaaaccaaacacagaaataatagtatagaaagaaaatgaactgattttgtgtttaaacgccagctgatgaattctaacaatagaatacttggaattaaaaaataattaattctgaaatttgtttttcttccgccaacgataaaaagacaaagagaacccagaattccaaggaaatcgttgtttagatttataaacaatatcttgctgtttatggcaaaaagcaataagattgcaaaaacagcaagtattgtttttttctgtagaattaaattcttcattaattcgttaatttttgctttctgtaatagaataaaatggcagataaaacgatgaataatagcgcccattcgtgtggctcaggtacggctccgtcattattgatagaagcatttcctaaagtattgacgtttttctcaattccgttatttttgtaatcttcatcagtctcaagtacgattaaagaagaaataggagttacaatattggcatcctttgccaggtcaacatatttgttttgttttaaagtgtcagcctgaatttcgacctgatcgtttaaaacttttccaaaacagaacattctgtataaatgatttgaaccggtatgagctgtttgctgaattgctgaattttcatggattgagattccggcagtttctatattaatactgttttcattagtttgaaattttatgaaatgctttttgctgataaggtctttacaagtattaagatttgtttgtataaaattcgcatatttctgttcctttgcggtctgccaaaacggatttatttcgttcgagatattgataacttttaagcctttgtcttttgttccttttcttattttttctaaatattttgaagattctaactcttcaaagttcgaagaaaatgtaccgcattttgtgataatcaaagtattttcctgtaaatcaaaaagtggcagaagtgaataattcaattcgtcaaattggttccaaatattctcgtaattggaagtattgatttcttgttttgtattatttataagtacaaaatatttatttttcgagagattgagtatcgattcaagttcttctattttccagttgttattgaggtcaagaatgatttcgcttggcgtaaaagcaatcctttctttgataagcggtttaatctcataacttttattcttccaaacaaatgcgctgctcaatggtttttgggttaaagggagttcagcttcccatttgtccagacctttagattcatttatgtggtaattatccgcaaagtcaaaatcttttgaagtcttaaactcagtatttccattaacctgaaatctcgaaatagtcgcagcattattgatatttggaccttttatacttaaactttgatagatcagtttatcgcctgtaatttttaaaggtgttgtaaagccacatttaaaagttcggggtaattcgcttgtaattggaaatacgcgaactgtaactcggtttccttctttccactgcatcaatgaagggtctcttgcctcaatacccacaacctgattgtacgcttcttttgctttttctttggtagtcaaaacaccttttctttctattccgttaacccacaatgacaaagaagttgcaacagagccttcaggcagttggaaggaataaatagcttctttctgccccctgctttcttcttcgcaaacaacatccattgtaatctcggtgtaagcgagtctgtcatttggataaatttttacatcttccttaatgttttttgtaataagatctcgtccactccataattgctcttcggattcaagtcttttatcaaaattagatttcagaatattgactttatcatcatcgcttaaattgatgttttctgcaaaatgataagcaatatttaaaaaaggattgtgagtctttctttcgtgatactgaacattgttattaaatctgccaaaaccgtctagttcaaagaagtcttctgatgcaatgtatacaatgtttttctttagcagaatttcattcaaaaaattaggtttaagattctgagaaactttaatgtaagtgggtaaatcgttattttcttcaaatgttttggtaatgccatattggtttattttttgactttccctgtttaataaaaaagtaaacacaatcaggctggttaaaatgattccgatgcctgagaggaacgcataggtgttgtttttttcttcaaaaagaaccttagacaggatgtaggtgtggattgtaagtacaattccgggcactaatccataaaaacctaatcctaaggcaagaattcctataatagaaaacatgcttattggtatcaggaatacagcataatatacgattaagagaaaggaacagccgttgatgaaataagaaatgaagttaatgttgcgatttgttatttcgcgattgtaaattacaaagtttgaaaagcaaaacagaaacgttgtgcaatacacccaaaggggtaaattttcgaaaacatttacataaacattggtagagaaacatccgataaaccaattgagaaataagaaaggaagtaaatgaaggtagctctttttgtttcttaataggttgtaagtaaggatagtaccgtacgggaggagaataatgatattgagtacagaaagcatttcaaagctttcgtaatctgatttacttcccaataaagaaagtgccagcatcgttgtgctgaatagcgtaataataaggctaatttttactccaatttggtcatttaaaaaagagtttattttggttgcattcatagaaagtgttttttaattaaaagaactttgaattgcaaagttataataataattgaaaaataaactttttgtttcctttttttgatttaaagatttctttaaatattcttaatgattttttggttttgaaagaggctgattcgagaagacaaatcggttactataacgttataattgcttatttagaaaggttctttgttaaagttggggtaaaatctcacttcatttatagcatcaaatttcgactttgctaaagaaaggattttaaaatggcaataattcatttttttaatataaaattgaaattttggcaaaaataagtaatgaaaattgttttttagcaataataatgtttgaaaaggcgagttctgttatattttttttaattctcggctttaatagctaaatttgcaaacaaaaaataaaaagacttctataatattatgaatacttatcaagattacattaaagaaatcgaggaaagaaaaggccaaggtcttcatccaaagccaatcgatggtgcagaattagcaagcgaaatcatttcacagattaaggatgttaacaatccgtatagagaagattcgcttaaattttttatttataatactttgccgggtactacaagtgctgcaggtgaaaaagctgagtttttaaaagagattattcttggagaagctgtagtaagtgaaattactcctgcttttgcgtttgaattattatctcacatgaaaggtggtccttctatcaaggtactgcttgatttagctttgggtaatgatgttgccattgcaaaagatgcagcaaaagttcttaaaacacaggttttcctttacgaggcagatacagatcgtttagtagaggcattcaaaaataataatgaagttgctaaagaaattctggaaagctacgcgcaagcagaattcttcacgaaacttccggaagtagctgacgaaattaaagtagttacttttatcgccggtgaaggagatatctcaacagatttactttctccgggtaatcaggcgcattcgcgttccgatcgtgaacttcacggacagtgtatgattacaccacaagctcagcaggaaattagagctttacaggcacaacatcctgataaaagtataatgttaattgctgaaaaaggaacaatgggagttggttcttcaagaatgtcaggtgtaaataacgtagcactttggacaggaaaacaatcaagcccgtatattccattcgtaaatattgctccaattgttggaggtacaaatggtatttctccaattttcttaacgacagttgatgttaccggtggtattggtcttgaccttaaaaactgggttaaaaaagtggatgcagcaggtaatgttgtgcgtaatgaaaatgacgaaccaattttagagcaaacgtattctgtagctacagggactgttttaacaattaatattaaagagagaaaactttacaatggagatcaggaactgatcgatatttctaaagcatttactcctcaaaaaatggaatttatcaaagcaggtggttcatatgctattgtatttggtaaaaaacttcaaacattcgcagcaaaaactttaggggttacggctccgactgtatttgctccttcaaaagaaatttctcatgacggacaaggtcttacagcagtagaaaaaatctttaacagaaatgctgtaggttcgacaccaggaaaagtattacacgctggttctgatgttcgtgttgaagtaaatattgtaggttctcaggatactactggtcttatgacagctcaggaattagaatctatggcggcaactgtaatttcaccaatcgttgatggtgcttatcagtcaggatgtcacactgcttcagtttgggataaaaaagcgcaggcaaatattcctaagttgatgaaatttatgaacgatttcggtttaatcacagctcgtgacccgaaaggggtttaccattcaatgacagacgtaatccacaaagtattaaacgatatcactattgatgagtgggctattattattggtggtgactctcatacgagaatgtcaaaaggggttgcttttggtgcggattcaggaacagttgctctggcattagcgacaggagaggcttctatgccaatcccggaatctgtaaaagtaactttcaaaggagatatgaaaggatatatggatttccgtgatgtggttcacgctacacaagctcagatgttgcatcagtttggtggagagaacgtattccagggtagaattattgaggttcatatcggtacgttaaatgcagatcaggcgtttacatttacagactggactgcagagatgaaagcaaaagcttctatctgtatttcggaggatgatactttgatcgaatcattggagattgctaaaggcagaatccagattatgatcgataaaggaatggataatgacaaacacgttcttcagggattgatcaataaagcgaataagagaattgaagaggtgagaacttctgagaaaccagctttaacgccagattcaaatgctaaatattatgctgaagttatcgttgatttggatcagattgctgaaccaatgattgccgatccggacgtaaacaatgctgatgtttctaaaagatacactcacgatacgatcagaccgttatctttctatggaggagagaaaaaagtagatcttggatttatcggatcttgtatggttcacaaaggtgatatgaaaatccttgctcaaatgttgaaaaacgtagaagcgcaaaaaggaaaagttgaatttaaagcgcctttggttgttgctccgcctacctataatatcgtagacgaattgaaagcagaaggtgactgggaagttttacaaaaatactcaggttttgagtttaacgatagcgctccaaaaggtgcagcacgtacagaatacgaaaacatgttgtacttagagcgtccgggatgtaacctttgtatggggaaccaggaaaaagcagcaaaaggagatacggtaatggcaacttctacacgtcttttccagggaagagttgtggaggatactgaaggtaaaaaaggagagtctttactttcttctacaccggttgttgtgttgtctacaattttgggcagaactccaacactagaggagtataccactgcagttgaaggaatcaatttaactaagtttgcaccttcaaacaaacagttagtgatgtaatttacgattagttataatcattatatatagagagcccgagtgataaactcgggctttttctttaattactcctctattttttgtaacttgggatgttcaaaaaaaaacacaaaaacaattatacttatggcttttgatattgaaatgattaaaaaagtgtatgagaacatgcccggtcgtgttgataaagcacgagagcttgttggtcgcccacttacgttaacagagaaaattttatacaatcacctttgggacggagtaccgtctcaggtgtttaaaagaggagtagattatgttgattttgccccggatcgtgtagcctgtcaggatgcaacagcacagatggcattattgcagtttatgcatgccggaaaatctaaagtagcggtacctacaacggtacattgcgatcacctgattcaggcaaaagtagatgctgcaaccgatttggcaagggcaaaaacacaaagtaacgaggtttttgacttcctatcatcggtttcaaataaatacggaattggcttctggaaaccgggagcaggaattattcatcaggttgtacttgaaaattacgctttccccggcggaatgatgattggtaccgattctcacaccgtaaatgcaggtggattaggaatggttgcgattggtgttggtggagctgatgctgtagacgtgatgtcaggcatggcttgggagttgaagtttccaaagttaataggagtaaaactaaccggtaagttatcaggttggacagctcctaaggatgttattcttaaagtagccggtatacttacggtaaaaggtggtacaggagctattgttgagtattttggcgaaggagcaacttctatgtcttgtaccggaaaagggacgatttgtaatatgggcgccgaaattggagctaccacttcaacttttggttatgatgcttctatggggcgttacctgcgttctacaaacagagctgatgttgcggatgctgccgataaagtggcttcttatctaacaggagatccggaagtatatgctaacccggaacaatattttgatcaggtgatcgaaattaatttatctgaattggaaccgcatttaaatggtcctttcactccggacttagcgactccaatttctaaaatgaaagaggaagctatcaaaaataattggcctttacagattcaggtaggtttaattggttcttgtaccaattcctcttacgaggatatttcccgagcggcttctttagcccggcaggtaagtgcgaaaaacttaaaaacaaaatctcaatttacaattacgccgggttccgaagtagttcgttataccatcgagcgtgatggttttattgatacctttcataaaattggagcgactgtttttgctaatgcctgcggaccttgtattggtatgtgggacagagacggagcagagaaagaagaaagaaacaccattgtgcactctttcaatcgtaacttctccaaacgtgcagatggtaatccaaatactttagccttcgtaggttcgcctgaattggtgactgctatggctattgcaggagatttaagttttaatccgttaacagatactttaatcaatgaagatggagaagaagtaatgttagaggaaccgacaggagacgaattgcctccaaaaggatttgatgttaaagatcctggattccagtctcctgctgaagatggttcaggagttcaggtagtggtaagcccaacatctgagcgtttgcaattattagcgccttttgatgcctgggacggtaaaaacattacgggtgctaaattgttgatcaaagcattcggaaaatgtactaccgaccacatttctatggcgggaccatggttgcgtttccgtggacatctggataatatttcgaacaatatgctgattggtgccgtaaatgccttcaatcaaaaaacaaattcggttaaaaatcaattaacagggcaatacgatgctgttcctgctgtagcacgtgcctacaaagctgccggagttccatctattgttgtgggagatcataactacggagaaggttcttcgcgtgagcatgcggctatggagcctcgctttttaggagttaaagcggtgttggtaaaatcttttgcccgtatccacgaaaccaaccttaaaaagcaaggtcttttaggattgacttttgctaatgaaaaggattatgataaaatcaaggaggatgatactattaatttcactgatttaacccagtttgctcccggaaaaccattaacattagagttcgttcacgccgatggcaccaaagacattattctggcgaaccatacttacaaccaaggtcagattggctggtttgtagcaggttcagctttaaacttaattgctgccggaaaagcttaatctttaagatttattcctattaaaaatgctctgtgaaaacagagcatttttttatgtagattttcaaaatgaatactaataaatacatttgtagtattcaataagtttagctgaaagttgcttttgaggtatgattttagttttaataggcttaaaaatgaaacttctcataaaaagcattatttcagggggttggatcaatttttatgccgagtttgttaatttcaataaaataagttgttaaaaaagatgctttttttactttaaaaagttaaattcgcttatcgggtaaaataattgctttttttgagcctataattcagaaaagtaattgcattcagagcgtataataatagatgtaaatgtaacagataatggttttcaggttaatagcaattttgttttttttcagtgttggtgctttctcacaagaaaagtatattaagcataaaatctcacaaggagaaaatcttactgtaattgctaaaaagtacggagtaaaaccaaaagatattacagcagcaaattctaatgcacccaaagttctaaagttaaattcggttttgttaatcccaaatcgcaataaaacagttgctaaaacagctaccaaaaagcctgaggaaattattgcaaatgttactgccgaaactactccaggctctcatgaagttgctgccaaagaaacgctttggggaatttctaaaaaatacaatgtttcagttgatgacttaaaaaaggccaatccgcttctggaaagtgaaggtttaaaaatcggacagcaaattgctattccatccaatacagctacaacaactgcaacaacagttccggtaatcgagaaagttcaggaacctgcaatggttgaggtaacccgggaagttttgtcaaaagaaacgaaatatgcgatagcaaaggagtttgggataaccgttaaagaactggaaaaacaaaatcctgcaattaaaaagagactaaaagtggggtacctgcttaagattaatgtttctccggaaaaagcagcagccttacaagaaataaagcctatcgaaaccacaacatcgacaccatccatacaaattgctgaggaaactgttgtaaaaaaagattccacatttgttagaggaataagtaataatttggaacttattgagcaattgattgtaaatgcaacagagaatattgggactcgttaccggtcaggcggaactacaaaagctggttttgattgctcaggattaatgatttgcacctttaataattttgacattaaactgcctagaagttcgatcgaacaatccagaattggggttagagttgacaccgatgccgcgcaaaaaggagatttaattttctttaaaactaacggaagacgccgcatcaatcatgttggaatggtagtcgaagtgaccgaaggtgagattaagtttgtgcattcttctacacatggtggggtaatgatttcatctacaaaggaaccttattaccaaagaagtttttctcaggtaaaccgtgttcttcaatagttaagcagtattgttttaaattcatctattggaaacggcttgtttaaaaaagcacttacatatttatttgccgtaattgcagcaatttcgtcaggatctaaagtcgatgaaagtatgtaaatttgaattcctttttttatttctttttttaatttatgaaattcttctaagaattcaaaaccattcattattggcatttgaatatccagtaaaatgataagcggatggtcattgtttttagtaacaagccactgaattccttctctgccattattcgcaatgatgatctgatcgatatcaaggacttttgtcagtagttgtttgatgacaagctgatcaatcaaattgtcttcaatgaccaggaatatgggcttaatttccatgataatttggaattgctacaataaatttacttccgatagtgttttcagagaaaacagaaatacttcctttgatgttttctacagcttcttttacaatgtaaagacctaatcccgaacctttgtttttgttcgtaccaaaatacatttcaaaaatattgtttttaaattcatctttaattccaataccgttatctgttatttcaattttgtcgtaaccctcttccgtataagttttaatcgaaataaacatttcctccttattaatgtcagcgtattttatagcattcgagagcaaattcgagataatgattctcagacgcaagtcatcgctttgaatggtatcgattaacagttcttttgtgaattttattttattggcattttcaatatgcatcaactgtgaaatggattcgtcaaatatttcttttaaactgacaggttctataataacttgtttgcgtttatttttagagtaatcgataatatcaactataaactgatcctgcctgataagacttttgtgcataagtgtcaggtagtctctgacttgctgaatgtcatcttcaagctgggtaatttcgatcaatccttttagtgatgttataggtgatcttaaatcgtgtgatgcgctatagacaaatcggtccagttcatgatttacatggattaggttttcatttttttcttcaatttctttcttcgaaatgagcagacgttttaccataatcgagtaataagtgcatacgcttattacgatgatcagaataaaaataatattggtgatgatgagaaggctttttatttttcgtgttccttctcctaatgtattcaggaagttacgttcgttaatagtgagtttatcgctgatggtactaatttcgttaagaaatttttgctgacttgccggtgtcagcagattttgtttgatctggccatcgacttgctgacccaacgtggataatttagcgattaattcgtcaccctgaccccattcgtgaatcgcttttgccaaaaaagagacatctttgaagtttacaaacaaccagacaatatcatccaggtcatctttatgatttcgtcctgtcagaaacccttttcgggcaatttcgctgtctccatatttcaaaagcgatctcctcgcaataccatcaccctgagggacttttaattcctgagaaaagagcttccattggtttgtatctttagtgaaaaggtacataatgagatatcgtaccgcatccttttgtccttttgaataatgtgattcaccatggacataagccctgtttgcggagagtatttttatggtgaaaaagttgatacagataagtaaagcgcaggaaataaatacaattatcaatagaatgaaaacattcgggaaacgtatatttttaaaaaacggactcttagacatagttttcagatttggaggttaatactgctttttctgttaagagcgcttattgttgaaggaatcttttaaaaaaaatcaggttactgagagtgttgtcttttgacggttttaaaataaacaattgttaataaaagattgatttttcaaaattgttttatgcatgcataaatttagtaaaaaaagaacagaattttagaattagtgttttttttcttacgagataattgttttttgttccagttttgttgtaaataaatcaaatgtattctgtgaaggctcttgttttaaattagaaagactaagaaaaggaaaacaattttaaaatttaatagataagaacaaactgaaaaaaggttaaacagaaaagtttttgtttaacaattctttgatgaataaaaaagaagttcttcttgcggggtataaaaaaaactacaacttttggctgagttgtagtttctaagtatttacagataggatggtaggtatattttattcttatccatgccaatagtgcccacagccatttttacacgctgtatttcttcgttcagtgtctgttactttaaaaatccaaagtagtgaggttagaatttttttgttctcgttttcaggaagttccgctagtttgtaaaaagcaattcgtgttgggaaattttttaaaagtacaatcggggtataggttgattttaatggaatagtatgaatagcattttgataagtttctgtattgtaatgcattttttcgggaatagagttgaagatataattttttaaagtggtaaaaagtctttcgaaattatattcagcatcttctaataaaagctgtaccccaatattaaagtctattttatcttgggcaatcttatttattattatctcttctttagacagttgttccataaagatattttgattccatttttatagtttgttgttctgcaatattgaactttaattagtactaaaatatagaattactcttgtaattgtttagtagttgttgctttttaatctcctgagatttgataatttctgaacgaaaaaaaaaatcatgattatctaataggattactccgtctaaggactataaataagaatctaaaatcaacactctaaaatcttaaatttcagaaaaaagtatatctttaaccaaccgaaaaactaaaattatgcaagaaaacgaccaggaacattttaaaagagaacttggattattagacggaaccatgcttgtggtaggttctatgattggatcaggaatatttattgtgagtgccgatatcgccagacaggtaggttcggcaggatggttaactttaatttggctgctctccggactgattacagttatagccgcagtaagttatggtgaacttagcgcgatgtttccaaaagcaggaggacagtacgtgtatttaaaggaggcttacaataaactaattgcctttttgtacggatggagcttttttgctgtaattcagaccggaacaattgctgcggtaggagttgctttttcaaagtttgcggcttatttatacgaaccattaagcgatgaaaatatactttatgaattaggtttcttcaaactcaacgccgctcagttggtttcgatttttacaattattgtattgaccttcattaatagtagaggggtgaaaaacggaaaaattctgcaaactgttttaaccatcatcaaaattttgtcattgttgggattaattatttttggactaaccttaggagcaaaagcttcaatctgggatgccaattggactgatggctgggtgacacgtagctataatgccgaaagcggttcatggctgcctattagtggaaccactttgattaccggaatttctgccgcaatggtggggtcgttattttccagtgatgcctggaatggagttacctttattgcaggagaaataaaaaatccaaaacgaaatgttggtctaagtttgtttttaggaacttttatagtaacgattatttatgtgctaaccaatttgatgtatttggcggtagttccgtttgaggagattgctacagctaaatcagaccgagtagcggtagtggcttcgcattacatttttggcaatattggtacattgattatagcaataatgattatgatttcgacttttgcctgcaacaacggattaattatggcaggtgcgagagtgtattatacgatggcaaaagacggtgttttctttaaaaaagcagctgttttaaacgagtccagtgttcctggatgggctttgtgggcacagtgtttctgggcttcggctttgtgtctgacaggaaagtatggagatctgctggattttgtaatcatcattgtattgattttctatattttaacgatttacggtatttttattttgagaaaaaagatgccgaatattgaaagaccttacaaagcttttggatatccgtttttgcctatgttgtatattgtaatcgcaagtgcaatctgtatttcgctattaattaccaaattctcgacttgtggatggggagttttaattatgctgaccggaataccagtgtactacctgaataaaccgaaagaagtttaaaaggaggtgctaaggtgctgagatataaggttcaaaggttaagtttgtttacaagttttatgtaccaaatgggtgcctgcaattttttaactttgatatttacttcaaaatatagatgccttgtctttgacaaggcatttttttagtcataaaatttagtgtctccagaaatttgccagatctgcatgcaaaaaaaagagattttcttatgtgggcagtctggctgagcgaagatgaagctccttttttatatgaaatttttcttaaaagagactacagataggtgtgttcagaaattgctccaagtatttataaagcatgtgatttcgcaagatcaaaagccccaacggagcggaacagaaatctttgagagagttcttttttggtgctctgtcctgagtaaaaaaaaacactacttatgcgcaaaagcaaaaagtagtgttctaaatgtaaataatcctggaagcgggcttgtgtaaattaagcgatttcggcttcaacagttgattctatcgttgaattaataatagataaagtaagaggatctgtttctcctgaaaagaaagcatccaaaatttcctgaaatacaggatttgtattttctaccaaagagaaaagcgtcatagacgaacgtaatttacgagcgtctaaatctcctaaaattccatcggctgattttcttttaaaagttaaaaacaactctgaaatttcgataagatgttttcctaaaatagggtgttctaaaaactcggttgcttcttttagatcgttaatggcgtaataatttgctgtatcgctcttacccaatccttttatctgaggaaaaatgaaccacatccagtgtgtctccttttttccttttttgatttcggaaagagcagtaagataaagtttgttttgtgcatctaaaaaacgcattaaatcattgtttgaataagccattgtggtattgtatatgtaaaaaaaggttgcaaaagtagtaaaaaagatagggttttcctagtaaaaggttcatacactgaggattttaactttttgaggaggaattttctacactattttagaatagaaataacgcctttttagttattttatttcagcacaagttttagaaaatcagctttttctgttcgttctcctaaaggttaagttgattcttggtaaaacatcgcgtgcggtttttggaacctgatgttgccaaaaactattggttgttccagacattaacagaaaggaaccatgatgaagcggaatctctacctgcgggatttctttccggaatttatgacgcaatcgaaacatgcgggtttctccaaaagtgaccgaagcaataatggggtctggtccggagttatgttctttatcactgtgccaggaaacaccatcattgccatttcgatataaattaagcaggagactattaaattcaagttgggtttctctttcgacacggcctctgatagttaataaatcataagtccagtcaggaccatttggatctgctccaacattatctttatcttcgtaccatgaaatcattcggggagctgtaacaattttatcatacatttccatttcatattctctccatttcgtttgatgaagtattctttcataaaaacgatcggattcttctttggcaaaaaagttgtcgatcaaaataagttctgcatcaggcaaatcaaatattttttttcctttcaagcctgtggcaaataattcggtatcgctaaatagtgtcataagtcaatactttaagtttatagctctatttttaaaattagattcgttttatattcttgatgtcagcaaatttttgttgaaaaacacttttcggggattcttttctgcataagcaaaaatcaactgtacaatgtattgattgcttttatatggtgtggcataattttttacttctgaaggatccgtaatcgcaacatccaacggaatatatcccataccataaaaatgaccattttctatccaaatgcaactgcgttcgtgcgctgttcttcctttttctataatggcaaaagtgggtctgttatttaataaaaaatcaatagcattgtcgacttgctcattgtggaggaaggtatccggcaagtcttttacatcattattttgaaatagttctccttcttcaggttttgaatatttgcaaaatctataatcaatttcaaatcgttctgctaaaccccgcagtatatttgttgcttcgtgtaaactactgaagtgctcgatacacgactgaaatttattgagttttccaatagccaggtacttgtatccattacgggcttcatattgatacaatccaaatttcggttcaaatcgctttaaagctctattgtaagttggccaaagatgtttgatttcagtacattctaacagaagtgccatcaactcgttgccacaaatttcataggaaatagaataaatatcccgtaagaaatgttgtctttgcggattgatattgtggccgctgaaatgagaagcaacgcgtttttttatattaactgcttttcccacatagattactttttttacctcattataaaaataatatacgcctggtttttccggtaaattattaaaatcttccggcggaaggttaggaggcaaacgctgatcctgtgccgtgtttttgatcatttgttccatatgaccttcgtcgtcccattccagtaatcgagagaacaatatagcagtagcttctgcgtcgcctccggcacgatgcctgttttctaaagggatgtcgagcgaattgcaaagttttcctaaactataggaggcgaaacccggtctgatttttctggctgcgcgaacggtacataactttctggccgtccatttgaatccggatgcctctagctggtggcgaacaaacgaataatcgaaattgacattatgagcaacaaagatccggtcgtttagcaattccattactttttcggcaatatcatcaaaaataggagcattggctaccatttcattgttgatacccgttaaggcaaaaatgggaagcggtatttccttctgcggatttacgagcgtctcaaagcgttccattacttttttgccgtcgtgaatgacaatggcaatttctgtaatgcagctgccactggcgttaccacctgtggtttcaatatcgactatggcatattcctgctttttcatcttatttgtataatgtctaacttatttctttttagttttcagtctcagtctcaatgtgcatttttttaaggactgtttatttggctgaaaacggtgtcgactgtgactgaaaactaaaacttcattcggtgtcggggtaaattaatttcatgtccttgcggataaggctcccgatgtgttgggctgacatcttcttttatctgacgctgtgttttaaactgatctttagcatccatataacgcggatcgggaataaaaggcattttggccattttggttatggtaatggttggaaaatgataatcgacttcgacatttcctagcaaaagatagcagccacctccctgaaaaggatagtttgcgagactgtccggaaaatgtgcggtgtcaaaataagtaccttcatgatcgatccaggtgccaaaatacatggttccttttttggtaggaacctgttttcttgaaatcaaataagcaagcatgcgaacctgttttttatggcaggctgttaaatctctggccatgatatcacctcggtatttagtttgtaaaaggtcaaaaacagtacaggaaacaggaaaactcaagagctcaatctcatcaaaggcatcttcatataaagaacgttccaaagtaggaagtttgtattcttttgccggttcctgtatcagcctcagatttctgttttcgggtttgaaattgttcaaaagcaaactggcaataactaaaagctgatttttggtttttcctgtaaaacgaaaagcatctataaaaattagaattttcatgttttcaatcccgataggaattctgttgataaagtcctccaatgaaagaaaagcaccatttttctcgcgttctgattcgatcaaatgagctgttttggattccagactctgcacatgcataaaacccagataaatgtctgtaccgtataaagtagtctgatattcacttttattcacgcaggggttgtgtatgcttccgcctgacatacgtgcttcgtgtacataaacctcggttcggtaaaatccgccctgattgttgattaccgctgtcataaattctaccggataataaactttcaggaacaagctctgataactttctaccgcataagaagccgaatgtgccttgcaaaacgaatatcccgcaaaagattcaatttgacggtaaatttcctgactcagtattttgggatgtcctttttgagcacagcaggcaaaaaaattgtcttttaccttttgcaaggcttcaagtgatcgtccttttccggacatcgctctacgcaggatatcaccatctgcagcgggtagccctccataatgttgtgcgattttgatcacatcttcctgatagaccataatgccgtaagtttcgccaagctgttctttaaaaacgtcatggaaatactgaaactgattggggttattatggcgaaaaatatattctttcatcattccggattgtgctacaccagggcgaatgatagaggaagcggctaccagaattttataattgtcacaattcagccggcgtagtaaaccacgcatggcagggctttcgatataaaaacagccaatagtgcgaccctgagccagataaatgttgcataaagcttcgtttttagaaatcgaagtattgcgaatatcgacttttatccctctgtttttctcgatgagttttacactgtcatcaatatggccaatgcctcgctgactcaggatatcgaatttttcgaaaccgatctcttcggcaatgtgcatgtcgaaaagcacgataggaaagccttttggaggcatttctaatggcgtataattcgtaataggttcttcggaaatcaaaataccacaggcgtgcatactgcgttgattggggtatttgctaagcatttgaccataatactgaacctgttttacaattttatttgtttcgtgaagctcttcgggatttttagcgagcatgtccagttcttctttcggaagaccaaatacttttcccacttctctataaatagaacggtatttaaattcgacattcgtaccgcaaaaagccacatgatctttgccgtatttcccgaagatatattccaaaattatattgcgttcctgccagctccagtcaatatcaaaatcaggaggagttttgcggttgaggtttaaaaaacgttcaaaatataaatccagttcaatagggcagatatcggtgattccgagacaataggcgataatactgttggcaccgcttccacgaccaatatgcataaaaccctgactgttgctgtattgtacaatatcccaggtgatgaggaaatagccactgaattctaattcatcaataactttcagctctttttcgacacgttttttggcttcctgattctcgtcttcataacggtttttgaatccttcccaagccagagcagtcagtttttctaaatcttcctgacgactattagtatagaattttttgttttttggaactccaaaatcatattcaaaattacagcaatcaattattttctgagtattgcttataatttcaggatatttttcataaaaaggcaaaagagattccgaagactgcagaatttcagaagctttacagtaatcagattcggttagtttagataagataacattagtatcaatggcccggagaattttatgcagattgtgttctgttttagtcctaaaagtaacaggctgtaaaatgaccatctgattcattttatttttgtgttcggatgtaaaaagcttggaaacttcgtctgttcgaatcccgatgaattcatttttacgaagaacttccggagcattttctaaagtataaatcacgaaaacggatttaaattcaggtgcaattgaaggcaaaagttctccgctgaaattatgatgggttaagaagcggttcatttctgccaaaccttccgcattttgtgccagaccaatatatcggaattgatgacggcatcgaaattccattcccactaagggtttaatccctttttcctggcatgcttttataaaatcataaattccggtaacggtattaatatctgtaagtgccattgcttttaccccacaagagacggcctggctaatcaattctttaagcggaattgtgccataacgtaatgaatggaaggaatgacaattaagatacattatttggtacgttttaaaatttcgtctttagtattgggtttaaaagaagcccccgcgcaacgcattacagcatcatagccataacggttttttattcggtccatagcggcgtagagtgataacatttcctgggtgtcttcaaaaagatcaatttgataggttcctcgtacaagcccgctaaagcgaataccaattaagcgaagccgcattcgacgttggtagaccttatcaaataattcggttacatttttggtcagaatatgatctgcagaggtataggcaattttagattgtttggtctcggtatcaaaattggcataacgtattttaaccgtaatggtcgaagtcagccattgttcagcgcgaagctggaaagccagtttttcgaccattcctaaaagtattcttttgagttttgcaatgtcaatcgtatcctgagaaaaagtagtttcggtagatattgattttctttccgtataaggttcaacgggagtgtggtcgattccgtgtgcttttttccagagctccagaccgtttttaccaatcatttgctgtagcacctcggcaggcatttcggccagcgtctgaattttgcgaacaccaattctggacaaaagctgaaaagtaactgctccgaccattggaattttctgaatcgataaaggatttaaaaagtcctgtacattttgttccggaatttcaagctttcctaccggtttgccttctccggttgcaattttagaaaccgttttattaatcgataatgaaaaactaataggcagaccggtttctttcattacagattgagccagctcattagtccatttatagctgccgtgaaatttatccattccggtaatgtcgagataaaattcatcgatgcttgctttttctaaaacaggtgctttttcctgaagaatttgtgtaacatcatgcgataattgcgaatacaattccatatcgcctttcattactttcgcatcaggacagagttttaatgccatacgaatgggcatagcagaacggactccgaatttacgggcttcataagaacaagaggcaacaacgccacgatcaccacctccgataattagaggtaatccttttaattgtgagttggttaacctttcacaggatacaaaaaaagtatccagatccatgtgtacaattgcccttgccattttcttgttttttggaataaacaaaattagcacagataataacatttttcgtatatttgctgttccaaattataacaaattaattatgtccttattttcagacaacatcagagcattaagggttaagcataaaatatcgcaggagaaattagctgaaaacctgagtattacaagagggagatacgtgaaatatgaagacggaacttcggaagcaccgtatgacattttaaagaaaatcgccttgtattttcataccagtatcgatttattattgtcagtcgatattcggaaaataaacatcgaaaatttgataaaactcgaagggaatcggcttattctacctattcaggtcgataattttggagaaaattatatcgaaattgtatcccaaagagcaaaagcaggttacctgaacggatacgccgatccggaatatattgaaagtctacagcaggtttctcttccgtttttaggtcctgggaaacatcgcggatttccggtcgaaggtgattcaatgccgccacacgaagacggatcgattattattggacgttatgtggaaaggctgggagaggtgatggacggtaaaacgtatatcctgattaccaaaaatgaaggaatggtttataaacgtctcaataagaacaaaaaaaatagtctggttttagaatcagataatagtttttaccccaattatgaagtgaaagcttctgatattttggagatttgggaatacgagtgcaacattggccgttcggacaaaaaacagcaattgtctgaaacggaaagtatgaaagaactgcttcttcaggtcaaaagagaggtgatggagattaagaataatacggcgaatacataagatttcagaacgaagattaacgatttttgatctaaacccgatttataattgatatccgtttgtcggtctgagcggagtcgaagacccttttacgccaggaagcccttcgactccgctcagggagactatagtcaataaaaaaactagaaacttttacaaatgtcgttaagtttggagattttagaacaaagatcaacgatttttgatttttgatctcgtgtcgttaaataacgaaattatcgattaaaacatctgaagtcaacaatcgttaatcaacaatcttatttaagatctaaaccttcaacgaaaaccaaaacgtacttcccaggcctaaattactctcaacaccaatagttccgttttgagcctcaataaattctttactgatggcgagtcctaatccggttcctgatttctgacttcccggaatctgaaaatatttatcaaaaactttgtctttgtagcgtgcatcaattccttttccggtatcaataacctgaaacgtaatttgatcgttttcttcttttaagcggatggtaatcgtacttttttcagacgagtaggtgatcgcattcgataaataattaatcaaaacccatcctgttttttcactgtcggcttttacattttgcaagtgttcattggcctcaacgatgagttttatttgtttttgctctgcctgaatttttaccgcttcggtagcataatttacaatggcgtacggattgcttttttcgatatttaactggatattcccggtttctaattgagataaattaagcaattcacccgtaattttcaataaacgctgactatcttctttaatgctttcgacgagttgtttctgatcgtcgttcatctctcccgttttattattctgaagcaattgaagactcagttttatagacgcaatcggtgtttttaattcgtgtgaaacggttgcaataaaattagtttttgcaaaatcgagttctttaaataaggtaatatttcgaaggatgataacatctccaatattaatttccttttcttcgcctgttggagttatggtgatattgatcgtttctttatcaaaataactttcttttccgtgggcaaaaatcttcatcggctgttttttctgagaatcatttgccggttctttcaggatcaaagagcgaatcaaatcattggaaactgccaaagcagaagcggattgaccaataacatcttccagtttcattccgataattttcagagcttcgtcattcacaaacaaaataacaccttcatggtctagtccaataataggatcgtgcatgttattgattaaagtttccagacgttttttctcaaagaataatttgtacaaactactattgttgtattcctgaagtttttgcgccatggtattaaaagattttgccagatcaccgtattcattgtgattggtaaaatgcacccgttccgaataatttttattggcaatttctttaatactctgggtcagttccttaatcggattagcgatattattgggcagattaaccagtaaattaaaagcgattaaaaagcagagcgttcctacaatagcaatccataaattggcattttcggcggtatgtttggcaatatcgcttttttgtttgatggcatcgagattgagtttcataatcgaaaaaatatcctgcctgatttgcgctttcaccatttcgttagaaccgtttttttctaaaagggcaaagtcattttccagtttggcagtggcttctttttctccgggttctgtaacattgtgggtttgtttctccagatattccttaaaagtatgaatcgtactatcactattcactttgatttcatctagtgacaaaatcatatttctggaatattccagcgtattgtaatttgctttcagaatattttcggtatctgcttttatcagaaacacagcatatccgcttactaatgagagtataataatcattaaaaataataatccgactcccagattcaatttggttttaattctcataatttattttttatgtgaaatgtagtttgtaaaatgtgagatgttattggtgagatgatgttttcgcttcatactttacatctcacatttcacatgaaacattttacatttaagacaatataacaagatccacatttgataaagacagactatttaacagacgtctgaaaatggttgtagacaaaattactttaaataaatttaaatgtggttttccaatacaaaccgttgtgatttgtttttcttcaacagtcattaaaatagcatctgcgatgtttttgttctctactttaatcacttcggcgcccagttgtacggccagtttaaaattattaatcagatagcgttgtttgtctaacgcaattttggtactgctttcttttggagtttctacatataaaacataccaggatccattgtaataactagccagacgcgccgcttttctgattacaattttggctgttttatcgttgctgctaatacaggccagtaatttttcgtgtcttaaagcatgcagttgaggtacttcgttttctacttttcgcactacctggctggctacttctttcaaagccaattcacgcaactgtaaaatttgttccgatttgaaaaaattagacaaagcggtctgaatcttatctgctgtataaatttttccttctttcagccgcgcaatcaaatcttcagaggtcaaatcgatatttacaacttcatcggccaatcgtaaaacattatccggaatacgttcctgaacatcaatactcgtgatgcgtttaacgtcttcatttaaactttcaatatgttgaatatttactgccgatatcacattgattccggcttccagaatttccaaaacatcctgccagcgtttttcatttttgcttccttcaacgttggtgtgtgcgagttcatcgacaattacaacttcgggtctaaggttgataatggcctgtacatcgagttcttccagctctttccctttatagaaaatggttcgccgtggaatcacaggcaaaccagataaaagctcatgcgtttcttttcgcatgtgcgtttcgatgtaaccaatttttacatcaattccatttcttaagagtgaatgtgcttcctgcagcatccgataggttttacccacaccggcactcattccgatgtagattttgaattttccctttcgtgatttctgaattaaatcgagaaagtgctgtgcattattttctttttccatattttttgctttaagcaataagctgtaggctctaagcagtaagacgaaagcttactgcttaaagcctatggcctaaggctaaaaagaaatcgccagcgaagtcgttacaaatgtattggtatccgttgggagattgttttttgtgaaaatttcatctttactggaaagatttctagcttctattctaaacattacattgtcagttactaagtaatcaaagttagctgaaaatccgtaagttttaaaaccatttggagtttctgtggcaataattactcctttttcatcactgtaatattcgccacgagctgccagctggattttatctgtaggtttgtattggacaatcaaaatcggagaaaaccaggtgtcgtatttgttactgtttttagccgactgttgtgaaccaatatcaaaaccagccgtgatgtttgttttgtcggttactttaaattgtccgtagaaattattaaagtaacgccattttttgttgatatccggttgttcatttccaacataagtgctccagtttaaaaccactttgtctgttggtttgtaagtgacctgagttccaaaagccggagtttggttgccttctactttttggatacgctgccagccgtttaaatacataccggctaaataccattctccggactccgaagtgtaaccaattttaactcccgtttcataataaggagagttttcagccagaattcctctggtaagattttgacaatcctttccaatagcactttcaaaaccaagatgcgaaggcataattcccgcatcgacccataaattatgagaagaagaaatcttcactcccacatttgcttcatatacattttttaataaaccttgttcggcagccaggttgtactcggcgtaagttccggccatcagcgcaaaatttccgcgtacattgcctttgctgtagtttacttttgctaatcctaaattgatgttcatttcattacttctattgtagttataaataaaccccgggcgagtatgattatccggttttgcgaaatcatagctgtaataaacgtctacatatcctgaaaatgtaaacggacttttagattcttcctgagcatgtaaattgctaaaaccaaaagcgattaaagcagtaagtattgtttttttcattttgttttgattgtgaggaaacagtgtcctcgggtagtaatttatttagtagattttttaggagctaatcccgctattcactgcaatcttttgtgtcctccgcggcggacacaaaaggatttccgtttctatcggggctagggtatttggggcaaaaaggggttttgtattataatcgattttatatccgaacaggtttccaaaacctgttcgaagaaaaaccttagaatcttagtatctcagtacctttatttcaactgatcaagagcaatgttcaattccagtacattcaccgttgatggacctacaacagcggtattgattttagatgctaccaaagctttcactttagcttcgtctaattttctttctttggcaatacgttttacctgaatcaaagcaccttgtggtgaaacattcggatctaaaccgcttcctgaggccgtaaccatatcggcaggaatctctgattttttcaggtagggatgaacgattaagaaagtatccactcttttttgaaccaaagccagatattccgcattgcttggtcctttattgcttcccgcacttccggcagcattataatctacagccgaaggtcttccccagaaataattggacttatcgaatttctgaccaattttttggtaccctaccacttttccgttaaccgaaatggtttctccttttccttgatttggagcaaattgagcgattccgtagattgccagaggataaataacggcaaacaaaattacggtgatcagtgtaagttttaatagtgaaagtatatttttcatttttttattttttaagtttctgagattctaagtctctaagatgctaaggaaaaaactcagaaccttagcaacttagttccttagtaacttcatgtttacataaatagagcaacaactatatcaattaacttaattccgataaaaggtacaagcaaaccgcctaaaccatagatcaataagtttctttttaagatcgcacttgctccgattggtttataatcgacacctcttaaggctaatggaatcaatataggaataatcaccgcgttaaaaattacagccgataaaatagcactttccggactgtgcagacgcatgatatttaaaccttccaatgccgggattgccgtgatgaaaagagcaggaacaatagcaaaatatttcgctacgtcattggcaatggagaaagtagtcagcgtaccacgagtcattaataactgttttccaatttcgatgatctcgattaattttgttggatcattgtcaagatccaccatgtttccggcttctttagcggcctgtgttccgctgttcatggcaacacccacgttagcttgtgcaagagcaggagcatcgttggttccgtcacccatcatggcaaccagtttacccagattttgttcgtttttaatgtagttcattttatcctcaggttttgcttcggcgataaaatcatcaacaccggcagcctcggcaataaacttcgcagtaagcggattatctccggttaccatcaccgttttaacgcccatttttctcaaacggtcaaaacgttctttcattcccgttttaatgatatcctgtaattcgataaccccttgaacctgattgtctttaataaccaccagcggtgttcctcctttagacgaaatatcaattaccttttgagcaatatcttcagggaaagagtttccagcctgcagtgctatgtttttggcggcatcctgagccccttttctaatattggtaccgtcttttaaaacaactccggaagttctggtttctgcggtaaatttgattaaagtagcaccttcaatggataatttactggcaagttcggctcctgccaattctacgatacttttcccttccggagtgtcatctgccaatgaacttagcacggctgattttataaaatcttcttctgaaacccctttcgcaggataaaaattcgttgcttttctgtttccgattgtaatggttccggttttatctaaaagtaaaacgtcaatatctccggcagtttcaaccgcttttcctgattttgtaataacgttagcacgtaatgctctgtccatacccgcgataccaatagctgaaagcaaaccaccaattgtagttggaattaaacatacaaacaaagagatgaaagccgcaattgtgataggtgcatttgcgtagtcagcaaacggttttaaagtcacacaaacaatgacaaagattaaagtaaaggcagccagtaaaatcgtcaaagcaatttcgtttggtgttttctgacggcttgcaccttctaccaaagcaatcattttgtctaaaaagctttctcctggttcagacgttacaattactttgattttgtctgataatacttttgttccgccggttacagaggatttgtcacctccggcttctctaattacaggggcgctttctcctgtaatggcactttcgtcaatggtagccaatccttcgataatttcaccgtcagtggcaattaaatcgcctgattcacaaatgaagatatctccttttttcaattgagaagaactgatgtttttgatctctccgttaggtaaaatttgtcgggccggagtttcttcacgtgtttttcttaaactgtcggcttgtgcttttcctctggcttcagcaatagcttcagcaaaattagcaaacaacaaagtggccagtaaaattaaaaatacaattaagttgtaaatgaaactaccctgatctgcagctcccattaaaatggaaacacaaacagcaaacataatggcggttcctatttctacggtaaacattaccggatttttgatcatcaattttggattaagctttacaaaagactgcaccaaggcttcttttacctgtttgctttcaaacaatgatgtggatttattatgagtcatttttttatattatttattagttgactgtttattttaacacatagaaacatagattttttcttttgagattaaggacgttttactttcatacattcacatagctatgtgaaaaaatgagtttttctttaattttcttttgatttcataataactatgtttctatgtgtttaaaaaacatcgtttagcattgagaaatggattattttagtgtaaaatattctgccaatggacctaaagccaacgctgggaagaatgataacgcagcaataattgcgattacggcaaaaaccattattccaaaaattgtagtatccgtttttaaagttcctgcactttccgggatgtattttttacctgccagtaaacctgcgatagccaatggtccaacgattggaataaaacggcttaacaataaaacaattcctgtagtgatattccaaaacggattattatctcctaaaccttcaaagcctgaaccattgttggctgcacttgaagtatactcgtataacatttccgagaatccgtgatgtcccggattgttaagccagcctgttgcatttccgctaaaccaccatcccattgctgtgtcatttgctgcaaaataagaagctaaagctgttccggataagattaataaagggtgaagaattgcgatgaaagctgcaattttaacttcccgtgcttcgattttctttcctaaaaattcaggagttcgacccaccattaatccggaaataaacacagccagaataatgaaaatgtagaagttcaaaataccaacaccacaaccaccataaaacgcattcaccatcatggcaagcaattccatagcaccagaaaccggcattgagctatcgtgcatactatttacagaacctgtagagattactgttgtagcaatactccaaaaacctgaaatggctggccctagacgagcctcttttccttccattgctccagtggtctgagcgattcccattttctcaatagcagggtttccgttcatttcgctcattaccgttgggataaccagtaacagaaatccaaccgtcataacaccaaaaatgacataagataattttctttttttcagataaaaacctaaagcaaaaatcatggcaaacggaacaattaattgtgcccataattcaaccgcattactaaaataagttgggttttctaacgggtgtgctgaattggctccaaaaaaaccaccaccattggtaccgatatgtttaattgcaataaatgctgcggcaggtccgcgggaaacttctacggtatcaccttgtaaagtggtaattgcatcttttccttcaaacgtcataggagttccgctaaacaatagagcaactgctacaatagcagaaagaggcaataaaatacgtgtacagcttttaacaaaataattgtaaaagttacccagtttttcagttgttctttccttcattgcagtgaaaaccattgcagctgcggctagtcctacacccgcagagacaaattgaaggaacatcagtaacatttgtgacagataagaaacaccgctctcccctgaataatgttgtaaattacaattgacaacaaaggaaatggcagtattaaaagccagatccggactcattgatgggttgttatcgggatttaagaacaacgatccctggaacaataaaacaaagaagcaaagaaagaaccaaatcatgttaatacctaaaagagcttttaagtgttgtttccagttcatttcttcagtggaattgataccgctgattttaaagataattttttcaattggattgaaaatggggtcaaaaagtgttttgtcacctaaataaactttagcaatatattttcctattggaatggctaaaactatcgtgatgataaaaataccaatgacacctaataattctgtattcatattttgtttgttagaaattaaataaagtttaagcttttacagatacatgataagtatgataaaggctaatgtccaagccatgtaaacagataccagaaatatttttttggattgtgactttttcatttttttagaatttttcgggtttaattaatacgtaaaccaaatagccaaaaacggcgatcgaaataataaatagtgctgtcatgatttagattttttcaaaaaattcaacagatttgaaacagatgccaaagagcagggcacccagtgcgagtaaaagaaaggtgattaacatagattattggattattagattattggatgttggatcattagattgtgatttgtgagatgttaattgtgaatatgatttcattttacttttcacatcttacagtttactaaaatcagactcctgaagtattaatttgtcggatgtattcagccttaagcgtttgtggaaaaagatgagagatattgcagtgacgcatttccataaaagaagaaacagagaaaacatatacatttgaaatggcgtttttagtttcgaaacttccgctgatgaataggcgttcagcaagtgcaagacatttttttgcccgaacaatattgccggatataattgattttttggttatctcagcaaagcgttccgcttgtttgtagattgaagtgacttgatttttcatgagaatgaatttttgtgttcttcccacttatgccaaaagtcagacctaaattgtaaaggaataggtaaggtgttgttgataaacgaattgcgggtttgtgccaaaaatgaggcaaaaaaaaagcctatcaaaatgataagcttttattgaaatgataaggaaattttaagttgcttgtgaagtgtgaaaagtaaaaagcgaggtgtaaaaggtaaaaggtgaaataggatatttaaaaagtaaaaggtcagaatttcacaaatcgcatttcacattatcacattgtcacattgtcacattactactgaatcccgtactcgtctaattttcggtacaaagttgcaataccaatttcgagtaaacgggcagtttcggccttatttcctttcgtatagtttaaaaccttctgaatgtgcagtttttcaacactctgcatcgaaaaggccgacatttgtttggtgtttttttctgattgatgttgcatttcgtatggtaaaacatctgaggtcagcgtatcgtcactgcttagaataaccgacctttcgataatgttcttaagttcacgaatatttcccggccaggaataatgctcgagcttttgaataaaatcgtccgttacatgcagtgtctttttattcgttttttcagagaattgtttgacaaaagagtgcgtcaaaagtgcaatgtcttttattctttcacgtaatggtggcagcgtaatctcaaaaatgttgagacggaaatacaaatccgaacgaaaacgatgttcttcgctttctatttttaaatctctgtttgttgcggctattagcctgaaatttgatttctttggagtggtatctccaagcggaatgtactcgctggtttctaaaacacgcaataatttggcctgcagttcaataggcatttccccaatctcatccagaaataaagtaccgccattggcctcttcaataaaaccttttttatcttttaaagctccggtaaaagcaccttgtttatgtccgaagagctcgctttcgaggatttctttgctgaaagtactgcaatttaaagcgacaaaagatttacctgtacgattactgttttcgtgaatagcttgcgcaaaaacttcttttccggtgccggtttctcccgttagtaaaacagtcgagtccgttttagctacttttttggctaaatcgacaacctgttcgattccttttgattttccaataatagtattaaaagagtatttgtctccaatgcgtttttcaagttgttttacttttttttgcaaatgcactttctcgacagctttatagagtagtggaataattttatcattatcgtctccctttacaatataatcgaaagcaccatttttcatggcccgaacaccatcaggaatattcccgaaagcggtgagtaaaattacttcaattaaaggaaagctggtttttatgttctgcaaaaagtctacaccatttccgtcgggcaattttacatcacataaaacgacatcaatatcggtttgttcgagtttcttgaaacctgattttaaatctttggcttcaattacttcaaatccttccgatttaataatgcgtgccagaagacttcttagtttttcttcgtcgtctataattaaaattttatgtgtcatttggggatattgttaaggaggggagttaatttcgagatacaaatttactctttaaatcttttgacttacgtattgtgggataaatttgaagaaaaaaaggagggatgaattcaggtttaaaaaagtaaagcttccggttttttctgaaattgctccagcggagcaaaatatttatagcaaatgtaattttccggtatcaagaagctccggcggagcgaaatataaatcttttgttacgttcttgaatgaagtgaaaaaattttataaatatagaatctatgtctctagtagttaaaagcaattatgctaacagattattgaaagatagtattcactagtgttccgtttttacgaaagaaatattataaatctattaacaacagaaaataaaagggatccatgtaaatgaagtagttttgtattctagcatttttttatatgaaaaacccaatttcagtctcattattagagctcgctatcattactcaggatagcaatgccaaagaaacatttcaaaaaacaaaagaaatagcgcaactagcagataatttaggatacaagcgattctggcttgctgaacatcacaatatggcacatgttgccagttcggctacggtggtgttaattggttacattgccagtcagactcaaaatattcgggtgggttccggtggaatcatgctgcccaatcactctcctttaatagtagcagagcaattcggaaccttggaaatactttatccgggcagaatcgatttaggtttaggaagagcgcccggtacagatcaaccaacagctgaagctattcgaaaagatttctttgaacaggcacagcggtttccgcaaaacgtaaccaaacttcaggattacttctcggtagaaaatgcaacagcaaaagtacgagcattcccagccgaaggaacaaatgttcctgtctggattttaggctcaagtatggatagtgctgcccttgctgctgcttacggattgccttatgcatttgccgggcattttgctccccgacaaatgatacaggcgtttgaattctatcgtgaaaattttcaggcatcagatacattggataaacccaaaaccatggcatgtgtcaatatcgttgccgcagctaccaatgaagaagccgaaagattgtctacaagtctctatcagatgtttttaaatttaattcgaaacgaccgcaaaggattacaacctcctgtagattcacttgatgatattatgagtgaagaagaacgcttccatgtgaatcaaatgacagcttgtacttttaccggagataaaatacagctggaggcagatcttaaaaagtttatcagttatgcacagattgacgagttaatggtaaccagtccaatatttgatcgtcaggctaagcttaaaagtattcaaattacaaaagaagttatcgatagcctaaattaaatgactacatatatataatagtagattggtttattgtactaatatagtatataaccctacaggttttgaaacttgtagggtttgtttttttactatctatatataaggagtaattctgtccagctgagcgaaaatgcaagaaaagtagtttctgtccggctgagcgaagtcggagcctttatccgctactatcggggctaggggatgggttttcaaaggaaagatcggtcataaaacaaaaacttcgggtctttgcgtcattgcgagattagtaaaaacccagtaaaaatggggctttgtatctaagagtttcatttgagagaagaaagaacctgtgaccttcgggttatgagcccgacgagctgcctactgctctatcccgcgatgtttcgggtgcaaagatacgccgttttttgagaaatccaacgaaaacattaaaaaatgttttattttctgtattgagttgatatgactacctttgcacccgagacccttgggtcaaatggtcctcagtacaattaaataatacacaaatgtcacataaagcaggttttgtaaacatcatcgggaatccaaacgttggaaaatcaacattgatgaacgcctttgttggagaaagattatcgatcattacttcaaaagcacaaacaacacgtcatagaatcttaggaatcgtaaatggtgaagattttcagttggtactttcagatacgcccggaattataaaaccggcttatgaaatgcaggagtcgatgatgaactttgtaaaatcggcttttgaagatgctgatattttgatttatatggtcgaaataggagagcaggacttaaaagacgaagctttctttaataaaatcatctatgctaaaattccggttttgttattgttgaataaaatcgacaattccaatcaggaacaattagaagagcaggttgctttttggaaagagaaagtaccaaacgctgaaattttcccaatctcggccttacagaattttaatgtaccggaagtttttggtagaatcattgaattgttgccagaatcgccagcctattatccaaaagatcaattaacagacaaaccggaacgtttctttgtaaacgagaccattcgtgagaaaatcttattgaactatagcaaagagattccgtatgcggttgaaatcgtaacagaagaattttttgaagatgaaaaaattatccgtatccgttcggtaattatggtagagcgcgatacacaaaaaggaattattatcggacataaaggagccgctttgaaaaaagtgggaatggatgccagaatagatttagagaaattcttcggaaaacaaattcatatcgaactttacgtgaaagtgaacaaaaactggagaagtaatgccaatatgctgaaacgattcgggtataatcagtaaacgtttaatcgtttaatcggttaattgtttaatcgttgatttgtctcaggtttcaggtttcaagttccgaatatagaacctgaaacctgaaataaagagtataaaaagaacaaaaaacttaggtacttagaaacttagcctctcagcaactttttttaactacctttgcaaaaaattaaaataaagcattttggattaataagggatagagttttaggaaactaaaaatctaaaatttagaatctgaaatctaaaattcaaaaaaatgaataataacattgttgcgatagtaggaagacctaatgtggggaaatcaaccctttttaataggctgatacaaagaagagaagctattgtagattcagtatctggggttacccgtgatagaaactatggtaaaagcgagtggaacggaaaagagttttctgtgattgataccggtggatacgttcgcggatctgatgacgtatttgaaggtgaaatccgtaaacaggtagagttggctatcgacgaagccgatgttattatttttgttgtggatgttgaagaaggtattaccccaatggatgaaacggtggctaaattgttgcgtaaagtaacaaaaccggttttattggcagtaaacaaagtagacaacgccatgcgtgagaaagacgcgattgagttttataaccttggtttaggagattattacacattcgccagtatttcaggaagtggaactggagatttgttagatgctttaattgacgcatttccggagaaaccggaagttgaggttaaagaagatttgcctcgttttgcagttgtaggacgtccgaatgccggtaaatcaagttttatcaacgctttgatcgggcaggatcgttatattgtaaccgatattgcaggaacgacccgtgatgcaattgatacaaaatttgatcgttttggttttgaatttaacctagttgatactgcgggaattcgtcgtaaagctaaagtgaaggaagatttagagttttattctgtaatgcgttcggttcgtgccatcgagcatgcagatatctgtatattggttatcgatgcaacccgcggatttgaaggacaggatcagagtattttctggctggctgagaaaaaccgtaaaggagttgtaatcttggtaaacaaatgggatttggtagaaaaagacaccatgtcgacacgtgattacgaagagaaaatcaaaaaagagttaatgccttttactgatgtgccaattttattcgtttcggctttaaccaaacaacgtttgttgaaagcattggaagctacagttcaggtttttgaaaacagaaaacaaagaattgctacttcaaaattcaacgaatacatgttgaaagtaattgaagcttacccgcctccggcaacaaaaggaaagtatgtgaaaattaaatattgtatgcagttgccaacgcaaacgcctcagtttgtattttttgctaacatgccacaatacgttaaagagccgtacaaacgttatctggaaaataaaattagagaaaattgggatttcgcaggagtgccaattgatatttatatcagagaaaaataaaaaaatgtaatttaagtaaaataaaaaatcgctcagaaatgagcgatttttttattttttaaactaagaaaattaaaagcaatggaataagaagctatataacgattgaaacgacaacgtatcatgaagtgtagtcagagtaagtttcttttttttgaaaaatgatttgtggttaacattattttaggtgaaatttgttgttaaataaaaaaaatatgaaaaaaattgtactagtaggtttgttgttatttagtttaataagttgctcagaagataaggaaacgtctgatgaaattgcgattcaagaaacgtcaatgaatattaatcttaattcgccaaaaacgaatattagcggaaaagatgtaaaacgagggacgcttcctgttgttattaacgcagccgtaattatagttcagccttggactttagctggtgggatagatccaagtagagttgaaagcgtttttaattttgacatcgtttcagataataaagcaggagctgcagatggattcgagataaaaaactttagtacaggaacttcaaggatatttgttagggctcattctagcgtcccagggaaagggtacgaatgggtttatggtatctggactggtgaatcaagtacggcatcagtaaatgatttatttataaaatgggaagcgaagcctgttgctattaattattttattcctgcaaaaataatggatttaatagctggagtaaataaccccgtttcatttacattagaggcaatgaatggtcgcatgatatcagtgtttcaattatcgaatgagttaaagagttggaattatagtgctacagtggaaactacaatgggatcaggtagttcagcaggattaatgactgttgataagacccgtaatgctgtaagctatcttgacggttattacactactgaaggtaaaccaataaaacatattattaatatttttgatgataaaggagaaaaagttgcacaatatgctgtaccagcagatgtaaaaaatggagaaagtactaataccatatttacaatactttctgataaaatacctgcagctaataaattacaaacaacaatattagttcctgatttcaaatcgccattacccagtgtaaaagatatttaattagctcaagataatgagttttgtgtatattcagttttagagtgtttgcactcagtaatataaaaaggcctcgacgtaattcgaggctttttttatgacttttcaattcagaatagattttgatttatgaaatggcacgttatattagtaaatgttgaaactgcaataaaccttttagctcttatagagtcttactgtctcaaacgaaccattttcatgaccaaatatttatattttctgattagtttccttttttgttatgcggccagcgcgcagaatgatattgttattaaaggaaccgtagtagatatcaatacgcaattgccgcttgagctggcaacggtttattttaccacggttaaagattctaccgtaatcgaatatgcaacaaccgataaaaatggagcttttagcattaccactaaaaagtatgataaacctgtttttctgaaggttaattatatgggatatcagccttattttgaagaagaaaagagcattcaggagagtaaggattttgggaaattgtatttgcttgaaaatgtaaacgccttaaaaaatgtcgtgataaaaagcgaagcaccgccaattaccattaaaaaagacactttagaatttaatgccgcttcctataaagtccgcccggactccaatgtagagactttattgaaacaattaccgggttttgatgtgggaaccgacgggaaagtgacagtaaacggaagagaagtcaatcaggtcttagttaacggcaaagctttttttggtaaagacggcgcgattgccttaaaaaatctgcccgcagaaataatcaaaaaagttcaggtgtctgattttaaaacgaagaaagaagagctctccaaacaggaatctacttcagatttttcaagcatcaacattacgatagacgaaaagaaaaacaaagggtactttgggaaaatattgggaggttatggttccgacgatcgatatgaaagcagtctgattctgaattttttcaataacaaacagaaaataagtcttttggcttcttccaacaatattaactccacaagttttgcaatggacgaggtttttgatacgatgggaggcggacgaaacagtaagggaaacactagttcaggtagtggtaaaggaatcacacagtcgaatttagtcggacttaattactccgatgactggtcgaaaagctggtcgggaatgggaagttataatttctcgaattcggttaatactaatgacagcaagtcagatcaggtgagttttttgcccaccggaaatattgccacttcggccgattctaaaaccagaaatgaaaataccggaaacaatgcgaattttgaactggaatataaaattgatcccacaagccgattggtcataacgccaaaagtcaatcaatcccgttcgaataataactcgtcttcatcaagtttttcggaagatgaaaatggaaatcccttaaatgaaagtagcgctaaatcctactcggaaagtaccaatacgagtttggggaataccatcaattttaataaagctttcaagaaggattatcgtaattttaatctttcttttgacagtaataacaccagtacagatagcgaggctcgaaatctttcgcaaactattttttatcaggacaacaaacctaatgatgatagaaatcaaagaagcttaaacaacaacaaaagtgatgtttattcgcttgaacttgagtataccgaaccggtgacagattcactaaggttaagatttggatctaattttgactggaataaagagatcaaagatgcaaaaacattcgatttcgataacgcaacacaatcgtattcggatttgaatgagtctttaaccaattataccacttcaaagcaaaattccttcagtccgaaagttggattaacctggcaaaagcgaaaatttacggttaatttaaacagtagaactgcaattgtagcgttcgacaatcattctttatacctgaacaatgctaccgatttgaacaaacgatatgctttgccttatggcgattttcaggttcgatacaaatttagccgttcgaaaaatttgtcattcaaatacgattattccaatgcgcttcctacggccgttcaattgatgccagttttaaatttaacgaatccgttgaatacgattaccggaaatcctgatttgaatcctattgagaaaaacagtgctaatattagctttagaaactatgatttccgcacgcgttccggttacagtttgtttgtaaaaggagattattataacaacgatgtggtttcgacttcaatttatgatgatagtggaaagagaacaactacttacgtcaatatttcgggaacctacacgacctcgattgggggaaattggaatcagtcggtaaaaagagatgctcacctttttagatatggtttgggattaaatggaagttattcttttgataaaggatttaccaatgctgtattgtacaatgcaaaatcaacagcaattactccaaagcttaattttacctatgaatacggtgagttgttaatcatttctccatcttatagtttgtcttataacgaaactaggtacgagaattcttcaagagatgccagttcaaatgtggtgcacagaatcaatttgcagaccacaagttattggccagaaaatctgatttttggaaatgattttggctacacttataattcgagtatttcgggtaatttcaaaaaagatttttatctgtggaataccagtttgtcttacggtttcttggataaaaaagtatatgctaaagtaaaagtttacgacgttctaaaccaaaatcaaagcgcgacgacgtcgatttcggcaacatcaatccgtgatgaagaaaacactgttttaaagcgttatatcatgttctccgtaagttataaaataggaaattttgctgctgaaaaagggaaaaagaagaggcaaagagaagagttttgatttccaggcggaacaagacaataatggtttttatttgaaagacagctaggatgctggatttttagacattagatttttggaatttggagtttgaaattttagaaataaaaaaaacgaggcaagttttaaaaacctgcctcgtttagtgtataaaattaactaactggttataatgaatattttaaagtaataccataagttctttgatcaccaagtacagcggcatattgtccggaatttccaccggcaggcagtaattgctcatagtaatctttgtttaataagttacgaccccagaactgaacagatagtccgtctgacgcgcggaatcctaaacgagcgttaaaaatagcatatcccggaaccactaggtattttgaagcagaaggacttgatgaaaattcagaacgtgcataagaatcaaccgctaagaagatttttcctttgtttccgaagaattttgcatggtcagaaagctcacctcctaaagatcctgcccattttgaagcacccggtaattctgttccggaaacatctttaaaagctacaggagctccagtttcttctaatggaagtggtgcattggtaaacttaacatattttgcatctgtataagtagcggctgcatttacagtcaaatgctggctaaaaacaaaactggcatcaagttcagcacctcttacacgtactttatcagcgttggcaagataaccacggtttacaccaagttcggcagcctgaacattggtttgaaaatctttgatttccgtattaaagaaagtcaggttaaagatggaatttttgaacggagaagtttttaccccaacttcataatgatttactttttcaggtttgattaccgccagatccaataatggcagtccttttgaatctgttggaagtcctgcaacattcacacccacgggtttgtaacttttagcgtaagtcgcataagcattgattttgtcagatgctttataagataccgttatgtttcctgagaaatcggtgttgtctgtattcgaagcaaaagactggtctgagtaaaccgattttttaagtgccagtaaagccggatcagtagtttgaagaccaccgtaagtcgtacggctgtagtgagcatcttttttgtcaaagttatatctcacacccggcaatacatgtaaacgctcggtaattgcccagtcaacctgaccaaaaacagcagcactggaagctctgattctggcatctgttttaattccgtatccttcaaaaagtcccggagttttccatagcggactggtactgctttgtgagaacctccattgagcattaccggattcttctgttccgtttgtttgcgaagtttgatcaataaagaaggcaccaacaacaccactaagtttagaagttagttgacctgcgtaacgtacttcttgtgtaaattgagtctgtctggttgggttttgagacttagccaaaacttgtaatcctgtaaagtctctgtcatttgatggatcccagttccaaaaacgccatgcggtagtggaagtaagtgttcctgatccaattttagtatcaacgttaagagaaatacctcccatgtcctgtcctgaacgccatggggtatcgtgatcgatttttcggtcaaaagcattttggcttggaagctgataatttaaatctttaatgatggcattaaattgtctgtaaccagctctttgtgtaggcgcaacaccggctgcaacctgcgcgtatccatccggacgttgcgttgtgatatcggctgccagaataatattagtattttctgacggagtaaaaagcaattgccctctaattccctgattgtttaaactgtttgtaggtcttcccgtagccacattgtcgatcaaaccatcgcgttgtgtacctgaaaaggagatacgacccgctacttttttacccaatgctccggtaacggatgctttcgcctgaagaaaagcataatttccgtaactcacttcaaaatcagcaccagtagtaaaacttggtttgcgagtggtaatattaaaagcaccagaggtagtatttttaccaaacaaagatccttgtggtccgcgtaatacttcaatttgttctacgtcgataaaatcaagagtagtggctgccggacgggcataataaaccccatctacataaaaaccaacacctggatcaataccatcgttagtaagtccgaaaggagaaccaaggctacgaatattgattcctgtatttctcggatttgaagaatataattgtacagaaggaacgagttctttaattcggttcacattaaaagctccggtttgttctgcctgtttaccggtaattaccgatacagcgattggcacgtcctgaactttttcgattctgcgtcgagaagaaaccactacttcaataagttcgttttcttctttgatggttatttgtaggggagttataggtaaatcggtaagttcgatctcagtggttttataacctacatattgaactaataaggttaacggaagttttcctctgctgtcgatgctgaattttccgttttgatcggaagtagtatttgaggttgtcccttttataacaatgtttgccgcttctaaagggatgttttcgcttgttttaacaacaccttcaatgttttgcgcaaaggatatggagaaagttaaaaaagataagattgtaagtatattttttgtcgaatttttcatttttacattaagtatatgtgattagtagaatttaaaataaattttttttaccaacacatacacattgtagaagaatagttgttcacagttgtgaatggaataatataatttctttgcaaaagatttttcgatacatcgattggttgtgaatgtactctcatagttaaaactttagtaaatgatttgttaattattttttgcaaatatatatataaattctatcgatttactaggaattaaaaaatatttttttatttcttgatgagagaggcgattgtgatgccttgcatggccttaagagtctcgtcccgaatgatcattaaaccatgtcttaagctgcactcttcctcggttttacaatctgaacatggttcgtaaaagtttaaggaagcacaaggcaataaggcaattgcgccatcaaataaacggtgaatttctgccagagtgatgtcatttttggagcgtatcagataatatccgccaaattttccctgcttactgcttaccaaacgccctcgtttcaggtctaataaaatctgctccaggaactttttaggaatattggctccatcagcgatttcaatagttcttgaaatgtgattttcttcttgttctgctaaataaagtaaggccttaagggcgtattttgctttatgtgataacatcttttgttttaattatgaattataaattgtgagttgtgggttgtgggttttgagtagttaaacttaaattttattttaaaatttaagtttaaggggaaacctgaaacctgaaacctgaaacctgaaacctgaaacctgaaacctgaaacctgaaacctgaaacctgaaacctgaaactgtttaccagcctccgctagaacctcctccagagaagcctcctccgccaaaacctccgccaaagccgcctccgcctccggatgatcctccgccgaagcctccaaatccgcctccgccacttcttccaagattgcttagaatgatgacatcgagcaggctagggccgccacctccgctattattgcctgaattgcctccgccgcctcttttatttcgggacagtaaaattaatacaattacaacaattataataaaaggcaggattggaaaatctttttctttggtttgtttgcgctcgcctttgaattttcctttaaaaacatcaatgatagcatctgttcctttatcaagtccgttgtaaaaacttccggctttgaattccggaataattatatttcggatgattgttccgccaattccggcagtcaatcggtcttcgagaccataaccgggatttatggcaatttttttctcctttttagccagcaggataataacaccattatcgtcttttgcagttcctccaattccccaggtttgtccccatttggttgctaactgacttacatcttcgccttttaaactttctatcgtaatcactacaatttgggtagtagtcgagtcagaataacgaattagtttttgttccagctgcgatttttcagatgcatttaagatgttggcataatcgtaaaccgaagtttgtaaacttggtttttcaggtattgtaaattgtgcaaaaatactgttgcaggtaacaagcgcgataaacaaaagagtaaactgaaaaattctgttggaatttgagattttgtatttggaaattttcattatttatccttttgatatttcgtttgataattcattgctgtctccttcagaccacggaaagtattttttcaattgttcaccggcattcaaaataccgtcgacaataccttgtttaaaatttccggatttaaattgttgaattagggcatctttggtacagtcccaaaaatcaggagtaaccacatcatttatacctttgtctccgcaaattgcaaaagttttatcagcaacggcaaagtaaaacaaaaccccattttgaagctgggtttcgtgcatttttaattcgtaaaaaacttctaaagccctttcaaaagggactttagaagtgctttgttctatatgtactctaatttcgccagaagtatttttctcggccacacgaattgcttctacaatttccagctcttcttctttggataaaaaatcttctacttttgacattgaaataattttagagtttagattgttgattttagattatgatctaaaaaactgttttagaattttacttcaactggtttgtctgcaccttcaactgcattaaagtatgctttttctttaaatccaaacatacctgcaaataaactatttgggaatgttttgatgtggttgttgtagggttttaccgcttcgttgaaacgtgttcttgccgttaaaatctgattttcagtactagccagttcgtcttgtaatttcaagaagttttcgtttgcttttaatgttggatattgctcaacagaaaccaataatcttgataaagaagaagatacgccgctttgagctttgttgaattcagcaagttgttccggtgtaatattagtaggatctacagtgacacttgttgcttttgcacgagcttcgataacagctgttaaagttgatttttcgaaatcggcagcaccttttacagtgtttactaaatttccaataaggtcattacgtctttggtaagctgtttgaacatctccccaggattgctctacagtttggtttaatgttaccgcagtattgttaatccctttaacccagctgtaaattccaataagtacaactgctccaataatccaaggcaaaaatcttttcatgtgtatttaatttaagtttatttctgatttaattaataggttataattcgttcttaatatcgattaattgtgttttgatggtctctaatttacgtattatttcgaatttatctaatgttttcttttgtccttctttcaaatgtgttttggcaccttcaagcgtaaaacctctttctttaaccaaatgatagatcaattgtaagttggtgatatcttcgggcgtaaacattcggttgcctttggcattcttttttggtttcaaaatgtcaaattcgctgtcccaaaatcgaatcaatgatgcattgacattaaaagctttggctacttcgccaatgctgtaatatcgtttatcttttgaaagctcaatatgcatgtttcttaattttctatatttattccaaaaatactactttttgcagtattaatctaatgactgattttcctggttagccatttgtgaaatggccacatattcgactgccgaaatattgccgtaatagaagttcagcggatttacgactttgccgtctttgtgtacttcatagtgacagtgcggtccttcagatcttcctgtgcttcccacataaccaataacatcacctcgttttacacgttgtccgggtctgcaattgtatttacttaaatgcgcatacaaactttcgtagccaaaaccatgcctgatgaccacatgattcccaaatcctgatgccgaattatcggcccgctcgataacgccatctcctgtagcataaacgggagtgcctgttttggcggtgaaatccattccgttatgcatttttcgtactttcgtgaacgggtcggttctatatccaaaacctgaagccatacggattagattctcatttcgtacaggctgaatggccggaattgccagcaataaattaccttttgtactggctaattttaaaatttcatctaacgatcgagactgaatcgctaattctttagagagacgatctattcgttttgtggtgtttaaaaccagttgagaattgttgtaaccttctaaatctttatattttcgggaatctctaaaacctgcttttcgaatagaatccggaatttcagctttgttaaaataaactctgtaaatgttgttgtctctattctccaatgtctcggctacagcatcgatttcatccatttttctgtttagaatggcgtattgtaatttcagattttcaatttctcgtgcctgtaaacgatcttttggcgtttcaaaatagggagtattgattaaaagtataaaaactaaaaagccaaataatgccgaagccaataaaaacagtaatgcatagccaattttagccctttttcgggtctttatttttgtataagccagattttctgagtcgtaataatattttactttcgccatattttaaaataccctatttttgcagcttgtaaaataagttagtcgaacaaatttaataaatgtttcatgatgttcgaagcttttttcaggaataaaacaatttagataatgtgtcaatttgataattagataatgtgataattgcgaaatttattgttttgaactttaatttttgtattaaaaagacgtaagtatcacattttcagattaacatgtttctaattaactatcgcattttcaaattgacacattttctaattttaatatgaaatcacaagacgtacgtaaacaatttttagatttttttgagagtaaaggacacactattgttccttcggctcctattgtacttaaagacgacccaaccttaatgttcaacaactcgggaatggcccagtttaaagaatactttttaggaaacggaacgccaaaaagtccaagaattgccgatacacaaaaatgtcttcgtgtttcaggaaagcataacgatttagaggaagtaggtattgatacctatcaccacacgatgtttgaaatgctggggaattggtcttttggagattatttcaaaaaagaggctatcaactgggcttgggaattgttgaccgaagtgtacaaaattccaaaagaaaatctttatgtttcggttttcgaaggaagtaaagaagataatgttccgtttgatcaggaggcttgggatatctggaaagaattaatcgatgaagatcgcattattctgggaaataaaaaagacaacttctgggaaatgggagatcaggggccatgcggaccttgttcagaaattcacgttgatttgcgtactccggaagaaaaagcagccgtttcaggaaaaagtttagtaaacaacgatcatcctcaggtagttgaaatctggaataatgtattcatggaattcaatcgtaaagctgatggttcgttagaaaaacttcctgcgcaacacgttgataccggaatgggatttgagcgtttgtgtatggcattacaaggaaaaacatccaattatgataccgatgttttcatgcctttgattagagaaattgaaactatcaccggggcaaattataccgttaaagcatcaaacgaagcggaagaaaaagtaaatattgcgattcgtgtaattgcagatcacgttcgtgcagtagcttttgctatcgctgatggacaattgccgtcaaataccggtgcaggttatgtaattcgtcgtattttgcgtcgtgctattcgttacggatttactttcctgaatataaaagaagctttcatctacaagttagtagaaactttaagtgaacaaatgggagattctttcccggaaatcagaactcaaaaagcactttgctcgaatgtgattcgtgaggaggaaaactctttcttacgtactcttgatcagggattggtacttttagatgctgtgattctgaacaattcaggagatactatcgatggtaaaaaagcttttgaattgtatgatacttacggttttccaatcgatttaacagctttgattctttctgaaaaaggattaaaattagatgaaaaaggatttcaagagcaactgcaattgcaaaaagaacgttcccgtgccgcttcaaaagtcactgcaggagactggaatgttctggtagaagatgatattcaggagtttgtaggttacgacagattatcgcatcaggtaaaaatcacgaagtaccgtagagtggatagtgtaaaagatggcgaaatttatcaattggttttcaatgcaactccattttatggtgaaagcggagggcaaaccggagataaaggatatctggaagctcaaaacggtgatatcgtttatattattgatactaaaaaagagaacaatcaaacaatccacctggcaaaatcgttacctgaaaatctaacaggaacatttaacgcggttgtggatgcgcttcagagagcaaaaacatcatcaaatcactcggctacacatttattgcaccagggattgcgtaaaatattaggaacgcacattgagcaaaaaggatctatggttcgaaatgcttctttgcgttttgacttctctcacttctcaaaagtatccgatgaggaattaaaagaagtagaaaattttgtgaatgcaagaatccgtgaaagtttgcctttgatcgaaaaaagagccattccaaaagatcaggctttggaagaaggagcaattgctttgtttggagagaagtatggtgacttggttcgtatgattaaatttggtgattctgtcgaattatgtggaggaactcacgtggcaaatacggctgatatctggcatttcaaaattatttcagaaggagctgtagcggcaggaatcagaaggatcgaagcaatcacgagtgaagctgcaaaagattattttgagtctcagttgctttcttatgaagaaattagagagaccttgaaaaatgctcaggatcctgtgaaagcgattcagtctttacaggaagaaaatatccagttgaaaaaacaattggaaatcttgttgaaagataaagccaaaaacatgaaaggtgatttggctaaagaattgcaggaaatcaatggcgttcagtttttagcaaaacaagtagatttaaatccggaaggagcaaaagatttggcttatgaattgggtaattcgtataacaatttgtttgtagttttcgccactgcacaggaaggaaagccaatgttgacttgctacatctctaaagaaattgtagcagagaaaaacctaaacgcaggacaggtagttcgtgaattaggaaaatacatccagggaggaggaggtggacagcctttcttcgccactgcaggaggtaaaaatgttgatggaattgcagaagctttgacgaaagcagttgattttgtgaaataaagattagtcgataagctttttcagagtactaaattgaaaaattagataatgtatttaaagaaactaaaattaataattattctttcgattgtttttacatcatttagttattctcaaagatatcaaatatatgagggctcatttgaaaatttaaatgatattaaactatttaaagtagcgtttaattacgaaaatattcaagtgcatggttttgattcggaagaagatttcttaagagaaaaaatggagaaaagaaaatctgatcctgaaaaagcggcaaatttcagaaagcattggttttcaaatcgggatgaatattacaatccggcatttgtaaattattttaataattattttaaaaaaggagaacgtaaaattgtagctgattctccctatttaatgaaagtaaatttaacttggatttatccgggttatgctttagaacctgctaagttgtctgcaacaattgattttattgatacaactaattcaaaaaaaattctagtggtacattttgaaaaagtcattggaattgagaaaaaaacaatagaagttgatgaatacgaaagagttattggtgcatttgaaaaactcgctaaaaacttagctattcagttaaaatagactataaacccgacaggtttttaaaacctgtcgggttttgtatttaatgtaaattcaacagtgtccagcttcagccggatgtttcttgaagttaaaaaggaaagagctttagtcaaacgtaacagtttggctaaagccctttgtgttaatttatctttatcttgaaaaaaaaccttagtaccttagattcttagcagcttagcaacttagggccttaaaaaaaattattttcgttctcctatttgctggcgccacattgcataatataagcctttttcaaaaattaaatcttcgtgtttcccttgttcgatgatttttccttgctccagtacaaatattttgtcggcgtgcattacggttgataaacggtgcgcaatcagaaccgtgatcctgtttttatcggatatattacgaatagtagtattgatttcttcttcggtaatagaatctaaggcagaagtggcttcgtcaaaaatcaataaattcggatttcttaaaatagcacgtgcaatcgacaaacgttgtttttcaccaccggatactttaattccgccttcaccaattgtggtgtttaaaccgtcttcggcacgatgcagcagtttttcacagctcgctcttttcaaggcatcgtacaagtcttcatcggtagcactgggtcttacgaacaataaattctcgcgaattgttcctgagaataactgtgcgtcctgggtaacgaatcctaattgttttcttagatccagtaagtcaatttctgcagagtcgatgtcgttgtagaatacctgaccttcggctggggtgtacaatccaaccagtaatttgaccaaagttgtttttcctgatcctgaggggcccacaaatgcaacggtctgtccctgtttaatttcgaaattgatattttcaaccgctttaaatttagcggttttgtgctgaaaacttacattggaaaagagtaaagactgaatcgctccaacatgctttgggttttttggacgatattctttcggagcgctcaataaggtcttaaaattctccatcgaaaccttagtttcatttaaagcaataatgaaatttccaagttcctgaagcggaccgaaaatgaaaaaagtaaagaaaaccatcgttagcaaatcacccacaataatctttcctccaaataagaaataatacaaagtaaaaaccacacaagttctcaaaaagtgtacggttgtgccttggataaaactcaaacttctgatgaaacggattttttgaagctccagctgtagaattttaaacgtatttaggttcagacgtttttcttcctgatacgtcaatccaagactttttacaagttcaatgtttcttaaactttcggtggtggaaccggctaaagcattggtttgatttacgatttttttagagacaattttgatctttttgcccagatacgaactaaccagagcaatgattggcgccgtgatcaaaaagataattgaaatacggtaatcgattcgggcaacataaacaatcacaaatacaaaaccaatcacagtctgaaagattaaagaaatcgatagagtgattaatttttcggaatcagaacgtactttggtaagtttgcttaacgtttcaccgcttcgttggtcttcaaattcggcaaacggcaggtccagtgattttttaattccgtctgtgtacatctgcgctccggtacgctgaataacaacattggtaaaataatcctgaaagtttttggtaattctcgataccatagctgcaccaagcgaaagtcctaaccaaaatgctaatgatttgataaaacctacggcatttccgtcgtatttatgcaaaccaacaccgcaatcctgcattaatttaccggtaataatagagtctgataaactgaaacaaatgttgattgttgccataatcaaagcaaaaaacagtaacattttatgtttgattatataagaatacagtaatttcataagtgaatttgaatttatggaagatgtaaaagtagtgaattgtttaacactgttaaatggatttttgttattaaaactgtaattttttttacagttgaaattgctggtgttttttttagatgtaaagcattttaatttctgcaaaacatcttttttattggagaacaaaatgaaactttaagaaaaaagccaagtatttatatcgcattttagtttttgattaaattttatcagtaatgaatttaatagatcttgctatttgttagtgtgttggcggctattttgggttatagtgcgcttttaaatgtggaatcccgtaaggttttagttttgggttgtattaagtttgcggcaaaataaatttaaccaaatcaaaatgaaaaaaattttatgcctttttagtgctttggctctagtagtttcttcttgttcaagtgatgatgctgttgatgcatcagcttcattaaaaccatcaaaaattgctttttcttactctgatcctaaagagaattacgctacagatatgaaatatgagggaagcaaactagtaagtgaaacagatagtgacggtagtattcttaagtattcttatgtaggtgatttaatttcaaaaatagaagagttcaaatcagataacgtacttgtaacgactactgaatatagctattctgcaggaaaggtggcttctgtaactgtgaaagatgcaggtgcaactaagtattataaaacaaaatacactcaaaatggagacggtactgtttcttttgaagggttttatgtaaacgccacaacaggagctgaagaagaaggtggaaaggttggaaagtatacttttaaagatggtaacttagttaaatctgaaagttctttttatggtaaggcaaatgctacctacacttacgagtatgattcaaaaaagacccctaatgctaatgttccagggcttaaacttttactagatgcagaagaagatacttctgttaacaatgttgttaaaataacagggacttcagctacttcatcttatgtaagtactttctcttatgtttacaataacaataattttccaacggagaaaaagcattttagtgacaatggaaagttaactgagacagctcagtttacatactaaaaacaaattgcaatttataaaaaaaccaaatactcttgtatttggtttttttattgcctaaaaattggtaaaacccgtattcaaattaaacgtcatgcaattcagaacccggatttcattttttaatccgcgagcaataagcaaatacaagaaaatagctaggtatttatacggttttttgttttttagttattttttttctaaaacgcttcttggtgtatgttgttcattattagtgctttaggtttgttttgagttgggttgcgcgttttcgatgtggaatcccgtaaggttttgattatgaggtgtattatgtttgtaatgctaaagatattttaggatttaataaaatttcttttgtggatgaagaaggaaccggaatttttcacaatgaaatttcagatacttcaggaaagactgtatggtctacctaacagttatacctataatgcagccggatatcctgaaaaaagcgttgataacattgaaggattaaaatatacatctgagtatttctattaatagaaagtttaaaatttgggggcgaaaagtcgggggcatttttgtttctggcttttttgtttgtgaaaaataaccgaaatttacacaaaacaacttcatgcaattcagaacccagattccaatttcaaaaagcagcaatccaatcgattatcattcgaagatcatttctatgggatcttgttttgcggaaaacatggcagagaaatttgattattttaagtttcagaacgaaaccaatccatttggaattatcttcaatcctgtttctattgagaaagtgattcagagagtggttaaacaggagttttttacggagaaagatgttttttttcataacggacgctggcattgttttgaagttcattcagatttgagtcattccgatcgacaggagttgttgcaaacacttaacgaagcaattgccgaaacaaacaaacaaatcaaagaggggactcatatcattgtaacctatggaacctcatgggtttacaggaatattgaaagtaacgaagtagttgctaattgtcataaagtacctcaaaaacaattcacgaaagaattattgactgttgatgtaattcagaaaagtatccaaaatacaatccgtttaattcatggtttaaataccaatataaatttcatttttaccatttcaccggtgcgccatatcaaagacggttttgtagaaaatcaattgagtaaatcgcatttgttttcggggtttcaccagaatctgcaatctaaaatcaacaatcagcaattaggatattttccttcttacgaaattatgatggacgagcttcgtgattatcgcttttatgctgaagatatgctgcatccgaatgctgtagcaattgactatatctggcagcgattcagtgaaaattacatcgcagagaatagcatttcgaccttgcaggaagtaggagaaattcaaaagagtctgcaccatcgaagctttaatccggaatctgaacagcatcagaaatttttagtcaagcttcgtcaaaaaataaataaggtagaagaaaaatggccacatattaagttctaaaacttcatggacttttatgatgttttgatattcagaacatcgtaaatctttgctgcaatttaaaatatcaatttcaacagagcagaattctttacgtttccgctcggtaaccacaataccaaacgtaagaaaataattatttgtggctaaattttagaataattacaggtaattatgtaaattgttagagtttaaattttacaaatttgtctttgcagatttgtccaaagcaaactttaatctaaatgtgttttattgacgtatgaataagaaaaccattcattttctaaaaaaaacacttcgtgtactgctttggtgcatggcttctgtaattacacttttattgcttcttattgtattaattcaggttccttccgtccagaattttgtaaaagataaggccattacttatctgcataaaaagataaaaaccaaagtttcgttagatcatatttcgataaaatttccaaaagacattgttttggaaggattttactttgaagatcaaaaaaaagataccctgttaagcgggaaacgtttggagttggatgttgatttgttcaaattgatcaacagtgaattggagattaattcggtttcactgcaaaatacaacagcccgtatttcaagggataaaaaaggagcttttaattttgattatattagtaaagcatttgagtctaaagaaccaaaggttgaagatccgaacagcaaaccttttaaaatttcggttgtaaaaataaatctggataacgtcaggtttgattttaaagatgatttttctaaaagcgacactcgtgtaaaactcacgcattttgataccaaatttaaggaattcgatttagataaaatgaatttcaacatcccggatatcaatctaagcgggttaaaggtagttttgaatcaggatgtgatcgaaaagatcgctgaaggatcagtgcaaacgatagataccgtctcgaaaagagcagatttcaatttgaagttaggaaacatcagattagcaaaaattgatattgtttacgacaacaaagattccaaattagattccggaataaaactggatcagttgaatgtagccgtaaacaaaattgatttgaaccgtcagttattggatttcaaagctttcgaacttaaaaatctaaaagggaatctacgtttgggggcaaaagacaaacagcttcaaactcccgatttagatactactgccataaaacaggcaggatggaaagtaaagttgaatgttatagacatccaaaatatagcgttcaaatttgatgatatgcaatcgaaaccaatttcgaaaggagttgattacagtcatatggatctgagtaaggttaattttaaagcagaaaaatggtattatgggaacgatacaatttcaggaaatataaaaacactgaccttaaacgataaaagcggcttgaagcttgaggctttaaaaaccaatttcttttacggaccaaagaacgcgtacctgagcaatttgtatttgaaaacaccccaaacgctttttcagcacactataaaagtgggttatccttcgatcgcttccgtttccaaagatttgggcaatcttactttagaggccaatttaaatcagaccaaaattggctttagagatatcctgctttttgctcccgatttacagcaatccaatccgtttaagagtaatccaaatgccgttttgaaggtcaatgcacgtttgagtgggaagataaaagatctgaatatggcccagttcgaaatgagcggaatcggagctacaaaagttgttgtttcaggaaagataaaagggatgcctgatgcacaaaaagcggattacgatttagacatcagaaaactatcaagcacgtcaaaagacatttattcgtttgtgcctgcgggaactgttccaaagaatattcaattgccttcacagttgaatttacaaggtaagtttaaaggttctgttgccaattttaaaaccaagctggctttcagcagtagtttcggaaacgcaaaagtagatgctttgttcgatcagcgcgtgaagaaaaaagaaaagtacgatgccaccgtttatttacttgattttgatttaggtaaattgattaaaaatgattcaataggaagaattacacttaaagcaaaagtaaaaggtaaaggtttggacccgaaaacagcacaggcagaatttgacggcttggttcagaaggctgtttttaatcaatacacctataaagatttggctttaaaaggcaatatcgagaaaggatcttttgttctaaactctggaatgaaagaccccaacctgcatttcgatttaacggccagtggaaataccgaagagaaatatccctccattcagttaaaattaaacctggatattgccgatttagaaaaattaaatctgcatgccggtccgatgaaactgcgtggaaatgttgacgccgatattgccaacagtaatcctgattttttgaatggaaaagtatttctttccaacattcagattgcccagacagcagaacctattgttctcgattcaatcagactgattgcctttgccgatcaaaatcgaaacaatatcaaagtttcttctcagtttttaaatgcggaggttgatgggaaatacaaactgacgactttatcggcagcattaaaaaaatcactgtcaaagtacatcgatttaaaaagcccaaaagtaaaaggagaaacggatgagcaacgattggcttttacggtgaagattgataatgatcccgtgttgctgaaactgcttcctgaattaacggggttggaacctgttactttatcaggaaagtacaataacgtgtcagattctttggaaataaaaggaagtattccgagaattgtatatgccgctaacaccattgccgacgggaaaatcaatatcgaagccaaagaaaatggtttagcatacaatgcttcttttggaacaattgagagcggttctttaaaaattccatttacaagcttatccggaaaaattgaaaataatgttttggattatgcacttgaagtaaaagatgctaaagagaaacaacagtattttattgcgggagacttaaagcacgacggttcaaaaagcagtttcagaattgatgctcaaaattttattctgaattatgataaatggaatatggatccggaaaatgtggtggagtttggagccaaaagattgtatgtcaataaatttaatttagaaaattcgggtaatgaattaagagttcaatcattaggagatcaggataatgcaccactacaggtcgattttgtaaatttcaaaatagagacgattatgaacatcgtcaaaaaagatcaattgttaatgcagggtctgattaatggacatgcactggttgaaaatgtaatgacaaaacccagctttacttcagacataaaagtagatcaatttgcattcaaaggagaacctgttggagatattacagtaaaagtagacaataaaaccaataatttgctggtagccaatattactcttagcggagaaggaaatgaggtgaatctgactggaaattataaaatcgacgatggaaatctggattttaatctggatctgaacaaattaaatatcaaaagtattcaagggttcagcatgggcaatctgactgagggaactgggtttttagcagggaatttcaaaattaccggaaatgctgccgcgccaaaagtaaacggagcactggaatttaaagagacaggtttcagagtaacaaaatttaattcctactacaaaacagctgacgaaaaaataacacttcaggatgatattatcacttttgatacctttacttttcatgatgaaaacgacaatgaactgattgtaaacggaaccattaaagcaacagattataccaaatttgactttggcttaactgtagtggcggataatttcagagcgatacattcgcaagaaaaagacaatgatttgttttatggagatttggtgttagacagcaagctgaacatcaaaggaacgctcgaaaatcctgtagttggcggcaatattaaaataaataaagaaaccaagtttacagttgtgatgccgcaatccgatccttccatcgctgatcgggaagggatagttgaatttgtagacgaagacaatcaatatctgaaacagactgttgctatggagcaaaaactcaatcagtcacggttagttggtatggacgtcagtgtggctattgccatcgacaaagaggcagaacttaccctggtaatcgataaaggaaatggtgattatttgaacttaaaaggagaagccgaacttaccggtggaatcgatccgtctggtaaaacaactttaactggtaaatatgagttttcaggtggggcgtatgaaatgaatttcaacatgatccgacgaaaatttgatattcagaaagggagttatatcatttggaacggtgaacctaccatggccaatctgaatattacggcgatttataaagtaaacaccgcaccaatagacttattgggcaaccaattgccaacggataaccctacggagcgaaacacctataagcagaaaattccatttcagaccttgttgaaaatgaacggggagcttttaaaaccggaaatcacttttgatattgtacttccggagggtaataatgatgtttctgcaaatgtggtatcacttaccaaagcaaaactccagcagttaagacaagaaccagcggaattgaacaaacaggtttttgctcttttactcttgaaccgatttattggcgaaaacccattttcgagcgaaagcgggggaaccagtgcagaatctctcgcacgacaaagtgtgagtaaaattttgtcacagcagttaaatgatcttgccggagaattaattacgggagttcagttagaatttgatctcgagtcaacagacgattatacatccggtagcagagaaaacagaaccgacctgaacgtcggggtttccaaaaagttgttaaacgatcgattaaaagttaccgtagggagcagttttgccgttgaaggtcaggaacgtgccaacgagcaaagtgccaatattgcgggagatgtggcattggattatcaattaaccaaagacggccgttatatggttcgggcttatcgaaaaaatgaatatcaggtggcggtcgaaggtcaggtagttgaaaccggtgttgcttttatcatcacaatgagttacaataaattccgtgaactttttcatcgtagtgcagcagaaaaagaaatgattagagaagaaaaattgcgcaacgaaaaaaagaaactgaaagagaaagaggagaagcaaaaaaaggaaaatcaaatagaagggaatgagcaaaaaacataacaatgtaagaatgaaatatgtcaggtattttgttgtgctgtccttattttttgtttttggatgcagtaacacaaaatatttgccggagggagatttattgtacacaggaggttcggtaacggtaaaagattcagttcttaaaaagaaagaacgaaaagcactggaaaatgaactgaatgatttactgcgccctaaacccaacaaacaattcctgggattacgtcctaagttatggttttataatattgccggagaacctaaaaaacaaaaaggaatccgatattggctgcgtactaaagtgggagaagctcctgtactttttagtaaagttgatttagagtataatgcatccgtccttcgcaattttaccgaaaacagagggtattttaaaacccgtgtcagtgccgattctactgttagcgacaaaagagctacagcagaatataaagtggtacccaaaaagcaatacattattaaaagcgtaatttttcctgacgattccttggcgatgtccagaataataggaagatcaagccgaagaagtctcttaaaggttgggcagccttatgatttggatgttattaaagccgaacgcgaacgtatagacgccagattgaaggagaaagggtattattattttaaccccgactatcttttggcaaaggtagacagcagcaaaggcgatcatgaagtgaaaattagattggtaattaaagcggatacgcctccaaaagcgcttacagcctataagatcaataaaattgtagtctacccgaattttaccatttcaaaagacagtgtaaagtaccagtcaaaagatattattcaatataaagacttcaccattattgatacagctgacagttttaagccaagagtttttgatcgcgccatccacttcaaaaagggagatttctacaaccgtaaagaccacaatctgaccctaaatcgttttgtaaatttgggaacgtttagttttgtgaaaaatgaatttaagccttcggatagtttgcccaatgcgctggattcgtattattatctgacgcttttaccgaagaaatttattcgtgtagaagttttaggaaaaacgaactcggccagttataccggtagtgagattaatatcaactggaacaacagaaacctatttcgaggggcagaattatttacggtttccatttttggtggtgccgattttcagctttcaggagccaataacgggaaaaatatttataagctgggaacagaaaccagtttgacctggccaagatttatcgttccgttttttcatattgaaggttccagcgaatatgtgccgcgaaccaaagcgacagtgcgatatgaatatcaaaacagaacacaattgtatgctttaaactcttttaaaacctcttttggataccagtggaaagagaatattcgaaaagaacatcaactgaatgtaattgatgtgacctatgtgagtcccaatcacgtgacggctgaatatttagcagatattcaagaagacccgtcattagaaaagataattgaaaaacaattgatttttggaccaacctatacgtatacctacaccaatacgatgcagaagcgtagaaaaaatacgttttactttagtggtgatttagatttggcaggaaacgttacaggtctggtaacaggagcaaatgttaaagatgggaatcagaaaaatatttttgatgttccttttagtcaatatgtaaaaatgagaggtgatctcagacattatttaaagctgggtaaagaaagtgaattggccagcaggattattttgggaataggacttccgtacggaaattcaagggcattgccaacggctaaacaatttgtagtaggaggaaccaatagtattcgggctttcagagccagatcactcgggccgggaagttatctcaatacacaaacgactaataattttcttccggatcagtcaggcgatttgaaattggagtttagtaccgaatacagggccaaactttttagtattgttcgcggagcggtatttgtagatgccggaaatgtctggcttttaaatgccgatcccaataagtccggtggagaaattaccaaagattttatgaaagatattgccgtaggagccggagccggtttgcgttttgatttgtcttttttagttttaagaaccgatttggcatttccgttgagaaaaccctatttaccgcaaggtcagagatgggtaattgatgatattaattttggaagtggtccctggagaaaagagaatttgattttaaatatcgccattggatacccgttctgattttatgtttttagaacagacagaataaaataaccgcaggaatagaaagcttactttaaacttttattcctgcggtttatgagagttgtttctacaatccggaaataataaattcgcttcttctgttcatttgatgctcttcttccgtgcaattttcattatcagaacaatggtttacaagttgtgtttcaccataacctttgcccgttaatctgtttttattaactccatgtttaataagccagtcgatagtagatttagctcttctatcagacaacagctgattgtatttatgcgtgtgacggctgtctgtatgagaacgaatatctaatttcattttaggatacaagttcagtacatccaggattttttccagatctaaagcagcttctttaccaatattggatttgtctaaatcaaagtatatcattttgataccgaaaactttgcctaaattatctccaatggttacctggtagcgggatttttcaagaggaatcggtagataagcttttgaacgatcttttgataccagtattttttgttcccaggtggtgtagttttctttttcggccctgatataatagggagtttcaggatctaaaacgaaactatactttcctttctcatcggagatggtggaatcttttacattcatgtcctgatcatacaaggtgattttggcatttggtaaaatttcattactgtccagatcagtcacaactccatataattggtagtcagtatttattttttttgtctctaaaaatttataaatatcatctgatccttgtccgccttttctgttcgatgaaaaaaagccttttcgggatttgatgtcaataatataagcaaaatcatcattaggagaattgacatctgctcctaaattttgaatattactaactccggcgtcgtttatttttccaacaaaaatatcaagaccgccaagtcccggatgcccgtctgaagcaaaataaatttcattttcatcggttacgaaaggaaatgtttcttttccttcggtgttgattccggggcctaaattttgaggagagctgtatcctccattactcaggattttgaccttgtaaatatcagattgtcctattgttccgggcatatctgaagcaaaatataaagtcttttcgtccggactgagagtaggatgtgccgtactgtattcattactattaaaaggtaattctgtgatattgtcccactccttcttttgattaagagtggctttgtatatttttataaaggtggttttttgtttgttttttccttttttaccatcaatataattattgcgagtaaagtaaatagttgttccgtcttttgtaaaagtgggagtggattcgtgaaacttactattgatttttgattttattttttttggtgcgcttggattgaaattttcatcgagcacagcttcataaaggctggtgaaactttcacccgtccacttatgtctttgttgtcccagtcctcctgtatctcttgcagtggtgaaaacaattttatttttgaaaaatgttgttccgtaatccgaatatttactgtttattcctgaatcttcaatcgtatagcgtccggaattcgctttaatcaaatccagatagttttcattttttttgtatagtttccctcttgtatcattctttgaatgctgagagaataaatcaagcatttgattggctttccctgtgcgatttgtcgattttaacgattgtgcatatcggtaataatattcgggctccacatcgttagtcatagcaaataactcgtcataccattttgcagctttgtcaaattcagcattaaagtaaaaagaattgcccagttttttgaacatatctgcagacttgtagccctttgaagctactctttcataggtttcaatcgcattaatataagcgtagttggcatattgtttgtctgctgtagctattttattcttttgagaataagtatgaaatgaaaaaaaacttagtattaataaataaaagggtatataattcttcatagtaaataattttaaaagaaacgaggggttgtcattctgctttgttttcggataaactcaaaacgcaggaatatttcatgcgaaccattactgtaattgtttagttttgaagattcaagatcataaccgtaaccgatgtacataccatctgtaagctgaaaaccggccatggtactgaaagcggcgtcccagcggtaggcaattccaaccataaatttatcgttgaacataaaattacctgagacatccacctgcagcggcgcaccttgtgttatttttgtgagcactgcgggtttgaattttatattgttgtaagcactcaaattgaatacatatcctcccattaagtagtagttaattttgtttttgaatatggctacttcattattgtcataataattggtcactataaaatccggtgccgataaaccgatgtaagctttgtcagaatgccaataaaccccggctccaatatttggagatatgacattatttaaattttgtaaatgtggatcgtccaaatctgcgggattcagcctattagtgtccagattaaaaagactaacagttcctttaagtccgaatgaaagtttaaaattatctgaagtctgaaccgtataggaaaagtcagtcgataaagagcttttatcagaagcaccaattttgtcatttacaagagaaacaccgatacctaaattactgtcgtttataggggtgttaattgaaaaagcgctggtttttggtgctccttcaaggcctacccactgtgcgcgatacaatccaaaaacactcagcgtacctctcgatccggcataggcaggattaatatttatggtattgtacatgtattgtgtgtattgtgcatcttgttgcgccgctatatttattacattgaaaagcaataagaactttaaaaaaaataaattctttttcatttgtatagttatttttttagtgaaacttctgtgcgaaaagattgtgaaattctctgtgtttttatctcaaagtaagatgtaagtatccgcttttttcggtcataagtgcaccgtttccataggaaagcacataaaaataggttcctgatggtaatccagcattttggtttaccgttgctcttccttcagaaattccacgaaaaaaattattgtttgcaccataattagtagtttcaaacactttgactccccaggaattatatatggttaccgaattatttggaaatcgttcgagacctctaatctcaaagtaatcatttttgccgtctccatttggagaaaccatattgaaaacaattacctccggatttgtaatgcccgcctgcgctttattattatgcggattgtaatcttccggagttgaattttccagaaaagcaatgttcagataatcccctgttgcttttacttttgctgttagggtcaatgttgctatttgtttggctaatagttctggtaaattccatattccgtttgttatattataatctcctgaagaagttttggatgaggtatacgtatatcctgatggaagtatatctctaatttgaacattgttgaaattatttcctcccagattttcagcagatatggtaaacacgacctgttgaccgatgtttgctattggattatttattgtttttcttaactcaatatctgcatcttcattaggcttcaaacaggaccctacttctatagaaaaattaatactcacaagaggattgcatttagcttcatcaatataattgacttcaatagcaccttttccggcattattccacaaaactgttacaaaatcatctgattgctgacctccatttacgatagtaccttcatttgaaacgagccaattgtaagaggacattccggccacagtagtgtaggttactttttctgaaatacaggccgacgtaagccaatcaggatctttattaggaagatcttttttaacaattacggtaacggctaaacggtttgtactctcacatgcacctgactttgccgttccgtaatacgttttaccatcgattagtaatgctgtggatggaattatacttcctcctgttagtgcatcgtaccagataattccggttccggcggctgttaaatctgcaactgtagcctttgcggttgcacagaattgttgtgtagcagcacctgttggcgttgtgggatcactgatgctaacggttacagctaaacgatttgtactctcacatgtacccgtttttgccgttccgtaatacgttttaccatcgattagtaatgctgtggatggaattatatttcctcctgttagtgcatcgtaccagataataccggttccggaggctgttaaatctgcaactgtagcctttgcggttgcacagaattgttgcgtagtagcacctgttggcgttgtgggatcaccgatgctaacggttacagctaaacggtttgtactctcacatgtacccgtttttgtcgctgcgtaatacgttttaccatcgattagtaatgctgtggatggaattacacttcctcctgctagtgcatcgtaccagataacaccggttccggagactgctaagtctgctactgtagcgtttgttgctgcacagaattgttgtgtagcagcacccgttggtgcttttggatcaccgatattaacggttacagctaaacgatttgtactctcacatgtacctgtctgtgctgcggcgtaatacgttttaccatcaattaatagggctgaggacggaattatatttcctcctgttgaggcatcgtaccagataataccggtttctacggtaattaaatctgctacagtggctttagcagtggcacaaaattgttgtgtagaatttcctgttggagttgacagacctccaagtctaatgttgatggattcggtgaaataacacccccctaaagaattaatttctactttgtaggttccaatttgtgctgctgttacattattgatatttaattccggggaaataacttcggttccatctggtaatgtccattttatagaatttacggggccaatctgtactacagatagtttgatgtttcctcctatacaaacagctcggtctccaccatttattaattgtgaaaatgaacttcttaaaatcagaggctgtaagacttcataacaggctgtttttgcttttacaatataatttcctgctgtcagtgctttaaatacaggacttgattgtcctgttgttgggaaatcggaatccgtttctttttttataaagtaagtaatactttctgaaacattgtttactttggcatgaagatcccctgttgtatctcctgaacagacaattccgccggattcagataaatcaaacgcagggaaattaggttgcacatctacaaaagcagtttgagtgttctcaattaattcgctttgcaagagaggtcttccacctataaattttcgggcgatccctatttcatattttcctgctatatcctgaaaaaaagaaaaattactgattccctcttttaaagaattagaacccagaatggcattaaaagttcccatacctgcaggtccgcttacaatcccggggaaaatttggttattcccataaaaattagccaatgtactgtttattgcacctgtaccgacagctgatacttttagggttatatttttgttataacggtcacatcttgaggtgtccggattaaaactaacgttggtgatttcaatttttgtaaaataactgtctagaaccacttgaaattcctcatcaaaacaagccgaatcttttattcttatggtgtaagttcccggaagtaactcatttcctaatccgaaaataggttctttataggttactgccaatggtgacggaccgtttacaagacttacggtaactttaccttgtaagcctacataaccgggagtggccataggaggatacaccgccagtgcacatttaccaaaaaacatagcacttggtcctgtgaaaaattgtattttacctttgatgtctttatcgggagcaaaataattgggatcgataaaaacatttttaggatcagtaatagcaggttttttagaagaagtgtttgaagtattgttcgtaaaagagtaagttgctatcgcgattcctgtattatccgttacttttatagtgtagcttttaccaatatttagtttacaaatttccaaactgtttatgcttgtaatagtataagtatttttgatacctgtaccgttgtctgttacttctacggtataaggcagacagcccccctgatctttaggtacgttttttagccgaacttgtcccgtgtcattgcaattggtattcaaagggtcatcttcgatactgaattcaaaatcaataaagggtttaacaatccctacagttgatgctccataatctagttcaacagtttttgttatgttacaatatgttgcgctcaagcggacaataccccatttggagcgatctgaaggcattgaatattttttctttacatcagtaagagtcagattgtcataaacgtcccagcctgatccgttctgaatctctaatttgtaaataaaatccggaactccataaagaggagggagagcattaaaataagcgccaccattacttacggctaatagtccgtttggaagggtagcactgctaataccggaacagacatcatttggagtgttataaatgagatcaacagcattaatggttcctttatcaaggttaaaattcttaagaacttcatttggcggaagattcaatacggttacaggtgaaattaaagtaccgcaattatctgtagccgaaactttatatttgccacttggcataccattaagtctgacaataccggttgctgtttgtacacttcttacaacggtaccatctgaagcatttagcaagttaacagtatagggagggtttcctttttctgcgttaatagcaatatcacccaggggatcaggatctgatgcacagtaagtataatttttagcggtaaaaagtccaatagttggagaaatagaagaataggtactgcctacctttatggtagttgcagcctttataaaagtattgttttcgtaatacccatagaaataatctcccggctctaagtgcgtaatcaaagaagctgaagatgcaataatagttgccggatcaaaaggagattttgcaacagcatatattataggttcagaaacatttttaactgtgatcttaattgtgccatctgctctaccatcgccggtacaggaagcatctgtggcaacagcagaaatttctgcctgggcaattgcagctaaaggcagtatatagaatagcgcgacgagtaattttgaaaatttcataaggagtccgttaaattgtgtttttggattgtggttatagttaagtttagaaagaggacaattcagaagaaagcactaaaatttcgtttaactcaataatgaaatatttagtgccttcaaggctgaattgataggcgtcatcttctatcttcatcttaacttaatgcaaaggtatttaggacaattgagacaaataattcagttttaataatcggattatcaatgatataattggttgttttgagtaacacttgatcggctaaatgttcccgtgttttagattttgggagggataaaaacttatatataagttaaagattacaaaatttttgatctacagctggtcacggtgaagttttgggtttttaaagtttgtatgaaaccaaaaaaacattttctgatataaattcatgcctaaaattctttgaggaagatagaagccgtatgcaaaacaaaagctgtaaagagttctaaaacctacatcaaaaaaagatttactttttagaaattagtttttagaaatgttgcattaataaatacatcagaagaaaaaaaccttacccaaatagagggcttttgtgaaaaaaagaagtaatttggtttaataaatggatagaatgcaaaatctagtaaagagaataatagttttagctgtagctgtacttgtcatagtgctagctttcaaatattgtgaattcaaaaaagatgacgattcaactattgattataataccaatctcattcagcagcaaatcttaaatgttggaaaactggtcgttaccgaaggtcatttttcggaagttataacttataaaaaccagcagaagtatttaatggacatggtttcttttgagaaaaaagcacttgtagtggtaaacgcaaatgttactgtagcttacgatttgcacaaagtgaaatatgatatcgatgaaaagaacaagacgattaccattttaactattccaaaagaagaaatcaccatcaaccctgacatacagttttatgatgttgaacaaagtaaactgaatccatttacgggtgacgattacaacaagatcaacaaatcggtaaaagcaaatctggccaaaaaaatagagaaatctaccttaaaaacaaatgctcaaaaccgattaatcagtgagttgtcaaagattttaattctaaccaattcaatggggtggaaactgcaatacaacggaaaaacaatccagtctgaaaaagagtttagcgaggatctgaagctttagttttttgaggtactaagaggctaaggttctgaggttttttcaatattgtcatttcgggcggaaggagaaatcttcgtaagaagcttgacaaagattggatttctcccttcgctctaaatattataaaagcacaaaatccgacaggtttttagaacctgtcggattttatataattgttttaaaaacttagcaccttagtatctcagaaccttagtacctcaaaaaacttaaaccgcttctttatcaaaaatcagatccaatccaccggcaattaaatgtgccacttcagggcgtttaaccttcaattgatctaaatgaaccaatacttcctgtaaaagttggtctttatttgaattctttaaaagctcggcgatttcaaccgatagtagccaatcattaggatggttttctttcagtttgtgaaatacagtgtttaactcagttgtaggacttttattttctctggtcaagcgaacggtttgataaaggatttccagatcgtcacgttcggcagtatgttgtgcttttatagtagttgttttgggtacggtattgatcaggtcaaaactattcacatcagccgggccggagaaagccgaaacgacttttttaccaattgccatatcgtaattcccccattcaggttcaaacaaaatggtttcgccatgagttacagtacaatttctgaaactaattaaaatgatttcgccatgcaggtttctggagcctgtaatgatttcgccttctacaataatatcaccttcaaattctaatcttacagtttcattttctacgatagagtaagcctgtaaatctttcggactcatgtcttcgattgctaaattgaagccttttagttttccaattgggcttccaaatccatgtggatgtgttagtgttccatgaccaaccaattccttttcacggtaggataaagccgtttttccggtagtctgaatatagataggttttccttcgtcttccaaaacattggtaaaaacacctgaaatctgtaaaccggtactcaactcaattgttcctaaagcattggagtgaattagtttttgtatgcctgataaacctccggttcttaaagccattttattggcaaattcttctaaaaccaaactcaaataggagaaatttggtgttacaaaaagttgtggctgtaattgtgtaatatcaaagttttgattggctgcagagatattataagggattttttttacgttatccgtcatgcaccaagcactctccccaatagaggatagtaaacccgcaccatatattttcggattttcaacggttccgattaaaccatattctaccgtccaccaatgcaggtttcgaatttgtgccatttcagacaattcgcccatattgttttgtaaatcggcaactgctttctccgcttcgtctattttttcctgaggcgtatcttccgcttctttcaaaatagaaagcaggcgaatcgcttcatacatctggtaatctttatgagaggagatggctttacagccaatttctccaaaacgtcttaagtattctgcatattccggattagcaataataggagcgtgtcccgcaccttcatgaataatatccggtgccggagtatattcgatatgttccagttggcgaatatctgaagcaataaccaaaacgttataagcctgaaattccataaaagcgtttggtggaataaatccgtccaccgctacagctgcccaaccaatttcagtcagaattcgattcataccgtacatacttggaatagagtcaatttcgattccagttttcttcaaaccatccagataagaatgatgcgcaactcttgaaagataatctacatttttacgcattacatagcgccaaaccgcttgattaattggtgtataatcaccataatcctgaggtttaataaattgctttaaatgtttaggcaatcgctctaataacgggtttgtttcaatattggcattcatttcgaaaacgttgtagattagaatgtaaaattacggatttacagtgctaatttttgctatttatatcaatttttttatccgaaatgttttttaattgcatttttcgtgacttttccccaataagaaaaggaagtttatctcttagcaatcattgttttcgtaattaactttctccagttttttttcatacgattcaatgtcttttttagtcatactggcttcttttagtaccacttttaattgttttttagtgtcaggacttatccataagccactaaaattggtgccttctttggttaaaatcatcatgcctgagaatccatgctctacaagcgcgaactgattttcgttttttgtgttttgcgtaatattcagctgaatccaacctcctgatttgtcataacgatagattgaagtgtacatgaggtcggctgtacagggattttcttccgcttttatataaaaagtgacacttatttttccgtcaattgttcctttgtataaagtgttttttgaggattgtgctttagtaaaatttaaaaataaaagagagaataaaaaaggaagtaatatttttttcatgtgtaaatgcaatagcaggtgagttaggggaattttacttgggtttaaaagtacgttatattttagttaaggcaaaccgtaaaatcagtcaattatcaattaaaaaattaatgattttcgggatttctgaaatagtcaattttataattgaacatataagccatgttagctgctcgcatttttgcttcttcggtaatagttcccgaaaatagcccgtcgatagaagtattaaaaagcagtacccaacgatcgaaatgggttttgtctaccggtaattgtttgtgtggaggaaaaggacttcctgaataggcacgcacatcaaataaaatggtttgccagaaaccgtacattttttctaaatgctccgaccagcgatcctggagtttctcgttgaaaatcggtcccagtaaatcgtcttttctcactttaccataaaaggtgtctaccattaattttatatcttctatgtttgaaatatctttaagagttgccatgttttctactataaatgaaagacaaaagtacgattaactaatttgtgatcgctgatatttatcatttcagattgtttgtaagttcgattgaaaaggtttttattgtaaaaataaacagttttaaatcgaacccttttttattttacccgatcagttgtgtaaatagatcctgacggtcatttaaatattgaaactcaaatccgtttttggtcatgttcattttaatcgccagtatgtcttttttgttctttagttctaaacctacgactactgagcctacctcacggctgtttttcttggcaaattggaaataagtgatatcatcatcagggcctaagatgttgtttacaaattcttttaaagcacccggacgctgtggaaactgaatcataaaataatgcatcagaccttcgtataataaagagcgctcttttatttcggcagttctttcaatgtcattgttgctaccgctcaccacacaaactacttttttaccttttattttatctttgtaaaaatccaaagcggcaatggttaatgctcctgcaggttctacgaccatggcttcttcgttatacaaacgcagaatcgtagtacaaacttttccttccggtaccagaataatatcgtctaaattagtacgacagatttcgaaagttttgtcgcctacttgttttacggcagcgccatccacaaatttgtcaattgtttttaaagctgtgtttttattgacatcgatagagtttttcattgaaggggctcctttgggttctactccaatgatttttgtatttgggcttagttgcttaaaaacttcagacaaaccggaagccagtccgccaccgccaatgggaacaaaaacataatcgataggttctttataactgtccagaatttctaatcctacagttccctgaccggcaataactttttcatcgtcaaaaggatggatgaaggttttttgattttcggttgcatctgctgtagctgaagcataggcatcgtcgaaagtgtctccggtaagtataatttcaacaaatgattttccgaacaattgtacctgtttgactttttgttttggagtggttttgggcatgtagattttaccttttatttgcaaaagatgacaggagtaagctacgccctgtgcatgatttcctgcactggcacatataattccgcttgctttttcggtttcggttaacgaagaaatcttgttgtaagctcctctgattttatacgatcgcacaatttgtaaatcttctctttttaataaaatagtagatttaaactcgtccgaaagatttaaattttgggtgagtggagtagcggcaaccacattttcaagttgcttttgagcagcaagtacttcgttaaataaattcataaagattaaattgttttttgccacagattaaaggattaaaaaagatttttaatctgtgaaaatctttgaaatctaaagcaaaatgttttgtactatattttttttaaataaaaaaaccctactattcactaatgattatggctagaatcagtaatagtaatatttatttttagaagtaatgaattaaaaatccagtgtgtcgtgatgttatctattcgcggtgtattgaaccccgattgccgtatttatttgccgcattttggcaggtaaggtattgtaattggaatatttattatctattaaccaatatttattaactatgaaacattattacagattactctttatgttactgtttcccttacttgcgtcggcccaaccagcccacggcaaaaaagtagtagggtattatgcgcaatgggctatttatgcccgggatttcaacgttcccaagatagacgggagcaagataacccatttgaattattctttttacgggacaacttttgaccctgcccgtccggagaatacaaaattaaaatgtttggatacctatgctgattatgagcatacggaaggcggaattccatgggatgctcctgtaaaagggaatttttatgacttgaaaaagttaaaagaaaagtatccgcatttaaaaattttaatctctgttggaggatggaccaaaggtcaggatctttctccaatcgccgcaagtccggtggcaagagctgctttagctgcagatatggcaaacttcatcgtcacttatccgtttattgatggatttgatatcgactgggagtatcctcttatgggaggaacagacggtactgaaatcgtgaacggaatcccggttcctccgcaaaagtaccacccggatgacaacaaaaaccttgtacttttactaaaagccatgcgtcaggcaatgcctaataaactggttactattgcagccggaaacaatgttcgaaatgtacctaaacaatatttagggccaaacaacagggcaacgtatggaatgaccgaagatatttcaacgtattgtgattacatcacttactttggatatgattttggtggaaactggtatgataaaacttgttataatgctcctctttatggaagcggaaacccgaatgatccattatatggtgcaactcagtcagaatcacttgatgagttaacgaacatctatttgaatgtagttggttttcctgccaataaattaatcatgggattgcctttttacggtaaaaaatttgacaacgttgccaataacggaaccaatccaaactttccggggttatttgttgctgcaccaagatataatgttgcaggttgtacaaatccgcaaaacccaacaggaacctgggacgggccggcagcttgtgagaaatccggcagtatcgaaatttgtggtctggtcggaaatccggttaccaattcacatgcttttttagatccaaataccatgttagttacgccaacggcagctgccgcaggttgggtaaggtattttgataatactactaaagttccttatttgtacaacagtagtttgaaacagtttatcagttatgaagataaacaatcaatggatttaaaagtacagtacatcaaatctaaaaatctggccggtggtatgatttgggaattatctcaggataccagaggctctattcctaattcacttttaactcaggtagatacttcgtttaaaagtattgttcccggaacggttagcattggaggttctgtaaaaaatggaacagctttggttactaacgttactatagagattagaaatgcaagtaatgcagttatagaaagtgtagtgtctccaacaggtaattttgcattttataatttgccaaagaatcaaaactatacccttacagcgataaaggcggcctataattttacaccggttagcttaacaaatgttgctgctgatcagacaggtgttgtgattcagggaacacagcctttgtacacagtaagcggaactattgtagtcggcacaagtacaacaccggtttcaggagttaccgttacagcaacgtccggtacgactgttttaactgctgtttccggtactaatggaacctacagtattacaggtttaacagccggacttaattttacagttacagctgccaaaactggctttccttatacaccagcttcgacagtgtataatgcaattgatagcaataaaacgttaaattttgctcagggtgatccaattgtatattatattgttagtggtacgatcttaaacggaactgcccctgctgtgggagttaatgttacagcaacatccacaggagcacctattacaggaacttctaatgcaaatggtttttatacccttaccttaccatcaggaggaaattataccataacagctgcggctacaggaaaaacttatacgccagcttcaacagtttataccaatttattagccgacaaaactttaaatttaaccgagtataacgttggaaccaataaaattagcggtacggttaaaaacggtacagttccggttgcaggagctaaagtagaaatcgttttaccttggaccgacaacacacacggatggaaaagcgttctagcaactacagatgcacaaggaaattatagctttgccaattcagttgtcgacggatatgctattatttcgagtttgaaattgaatgcgtggcaaaataatgacgttaattattttccaaataatctgaccagttttgctgttccgtcaaccccaacggtttataatttcaataccgccgctaccgcaagaacgtcctcttatgcaatgagcggaaaagttctaaacggaactactccggtatcaggagctgtagtttcggcagtttcaggtacgacagttttaactgctacaacagatagaaatggagcttattcttttggaggtttaacttcaggatcagattataaggtatctgttgctaaaacaaacctgacatttgctccggtttcagcagtttcgacaacagagtctggtaacaaaactcttgattttacgcaaaatttggccagtacaaatctaattagcggaaccgttaaaaatggttcagttccggttgcaggagcgaaagtagaattagttgtgccttggactgataatacacacggatggaaaagtgttttggctacaacagatgctcaggggaattttacctatgacaatacagttacagcaggttatgcacaagttttaagtttaaaattgaatggatgggagaataacggaacgaattattacccaaacaatctggtgaattttgcaatgccaacaacgccaacggtttataacttcaatacgcaggcaacggttgtaactaaaccagtagttgccattacagcgccaacgactccgacgattgcaataaatttagggtcagcgattaattttgtggctagtgttggattaagtgctgcagatgctactacaatctcgtctgtttcctttagtttaaacggacaaagcctgagtgctaccaattcttcaggaacttataccgcaacttggacaccagtagccaatcagttttcgcttagtcatacattaacagttacggctactgcctcaaacggtaccacagattcaaaaacatataattttgtattaaactgttcaggtgcaaactgtccaaatacattgccagtaattacttggaattcaccatctaatactactatatttcagccttctttccaagttgtgccaatttcagtgacagctgtcgacagtgacggatcggtttcaggtgtaacgattacaataaacggaggtacatttaacatgacagcaggtacaaataatacctatacgtataattttacaccaactgcttatcaggattatccgattgtaatcaaagcaaccgataataaatccgggctaactacattaaacaatagcattaaaattacttcggtaggtactagattcgttccgcttccaccaggcaaaattattttaggatacgcacattcctgggaaaatgctggtgctccatttttatatttttctcaaatggtaggaagtaagtttaacgtagtggattatgcattcgtagaaaccgttaaccgtgatggttatactccggtattaactacaaatgataccagatatttgaccaatggagtttttaataaacaattgttaaaaaatgatatcaagagcttaagggataaaggtattccggttattgtttctattggaggtcaaaatggtcatgttgttttagagaacgtaactcaaaagaatatttttgttaatggtctgaaggcaattattgacgagtatcaatttgatggagttgatatcgattttgaaggcggatcgatgaattttagtgcaggaggtttaagagatatttcttatgcgggtatttctgcttatccaagattaaaaaatgtagtagatgctttcaaagaattaaaagcgttctatggtcctggatttttattaactgcagctccggaaacacaatacgtacaaggaggatattcaacctataatgatacctttggttcgttccttccaatcattcaaaacttacgtaatgaattggatttgttagccgtacaattgtataatacaggaggagaaaacgcattagacggtcagtattatggttcagctaagaaatcaaacatggtaactgccctaacggatatgctgataaaagggtacaacattggtacaacaggaatgcgttttgatggtttaccgccttcaaaaatccttattgcattaccagcttgtccaagtgcagcaggaagtggttttttaacgccgacagaaggaattaatgcaatgcattatttaagaaccgggactactttctcaggaagaacctataccatgcagccaggcggaccatatcctgctttgagaggtttaatgacttggtctgtaaactgggatttttcttcttgtggtaattcagctgaattgtctaaagcgtatgccgcttattttgcaggacagacagctgcaagggcattacctgaagggatcgaaacgaaaaacacgactatcgcttactttaaaaatgatgctttattagtgacaactgactctggagatattgctcaggtagaagttttcaataccattggacaaccattggtgagtcatagaaatgttcatcaaaacaaagaagtggtgcttcataactacagctttaccactaagcaattatttttagttgtggtgacggacaaagcaggaaataaaaaatcattcaaagtaatgaactttttgaactaaaaggacagtatggaagaatgaaaaatacagaaataaaaagttggaatggttaaaattgagtttggttatttattttttaatctaatttttatttcgaataaatgctgcaaattgaggtgatttgttatttggttttcacctgaaggaagcgcattataaacccgacaattgtattgtcgggttttttttgtccaaaaataatacattactctttgcttttattttataagttttatcggatatttaaaattttacctgacgatagttttgtaaataatttcttatatttgaaaaaaaaagaatgattggggagaatgtaagaaagattagggttattaagggatattctcagcaatatatggctgatttgttagaaatttcgcaagctgcctactcagatatggagacaggtaaaacaaagattagttttgagaaattgcagaaaatttctttagccttaaatcttgacatgaattatatcgttaattttcatgagagtaaattgttcagttctaatttgaataatttgatgacaaacaaagaagagattaatgaccttaaaactcactttgctaaagaaagagaactttacaaggaacaaatcaatactttaaaaggggagataagttatttaaggaataaacttgatagtaaagaataagtagataatgtaaggcgaaaactaaatcttttttgaacgttttgtgaatcatgcagtattctttaaagaaggaattttttttaaggataagtgaacccacaaagtgctattttttttgctgctttatggaccctaaaattgaattttaagtacttttgaatttcataaattcattaaaaaagtcatgcaaaaatcaatctgcctcgtaatcgtatttttaatttctactattatcacagctcagacaaaatttagcgaacccgaagttgatcctatccagattcaaaaaaactttaaggactggtctgtctatcaaagtaaaaatattatgctttcaagagattttctagcgttggatgctctttcaacggaaatttccaaagaaacttttttggatcaattagcaaacgaaaattacattccaattcgattaaagtcagagcaggggatctattgctacaaattgtttacaattcagcccaattcagataccagtataaaagcaacaatacaccaaataggttttgatgctctaaaaaactataaaatggaaggaactgtttttcctccattctcttttaaagatttagaaggtaacctggtttcaaacgaatcgatgaaaggaaagatagtagtcatcaaatgctggtacattcattgtacaccctgtatcagagaatttccacaagtcaacaaattagccgcagaatacaaagatcgaaaagacatgctgtttgtaagccttgcagaagattctgccacgcaattaaaaacattcctctccagaaagccattgtcctatgctgtaattccagacatgaaagtatacatgaatgaagccttgcagttaaattcatttccaacgcattttattttaaacaaagaaggaatgattgctaaagtcctgcctaatttcgaaagtttagaagtcgctttggataaagagagtaaattatagtgtgtgagatgtaaagcgtaagatgttatcacattggagcgaaatgaagtgttttacaattaacatttcacatctcacaatccacattttacaataaacataaggcctttgcaactctgaaccttttttcatacttttgcaccaaattaattaaaaagacattcatgttaacagtcaataatttatcagttcagtttggcaaacgaattttgtttgacgaagtaaatacaactttcactcatggaaatatttacggagttattggagccaacggtgctggaaaatctacttttctaaaaatcatctcaggtgatatcgatccaacttcggggcatattcatttagaaccgggaaaacgtatgtcggttttgaaccagaaccacaacatgttcgatgagcatacggttttggaaactgtgttgatgggaaataaagttttgtatgctgttaagaaagaaatggatgaactttatgcagactacaacgataaaaacgcagacagaattggagaacttcaggttcagtttgaagaaatgaacggttggaatgccgactctgatgcggcggcgatgttgtctaacttaggaatcacagaagcagatcattatactctaatgggggatttggaaggaaaaattaaagtacgtgtgcttttagcgcaggcactttttggaaatcctgatttgcttatcatggatgagcctaccaacgacttggactttgagaccattgcgtggttagagaacttccttgcgaattatgaaaatacagtaattgtagtatctcacgaccgtcactttttagatgcggtttgtacacatatttctgatattgattttggaaaaataaatcactactcaggaaactatacgttctggtacgagtctagccaattagcggcaaaacaacgtgcacagcagaataaaaaagcagaagagaagaaacaggagcttgaagaatttattcgtcgttttagtgcgaatgttgcgaaatcgaaacaagctacttctcgtaaaaaaatgatttcgaaattgaatatttctgaaattaaaccttcaagccgtcgttatcctgcaattatttttgatcaggatcgtgaagccggagatcagattttgaatgttgaaggtctgggagcttccatcgatggcgatcttttgtttaaagacgttgatttgaatatggcaaaaggcgataaaatcgttcttttttctaaagattcacgtgctacaacagcattctaccaaattttgaacaaccagcaaaaggcagatgccggaacttttgattggggaattacaaccaatcaggcttatttaccggctgagaatcattctttctttgaaaatgatctgactttggtagattggttacgccaatacgccaaaacagaagaagagcgtgatgaggtttttattagaggattcttagggaaaatgattttttccggagaagaggcgttaaaaacaagccgcgtattatcaggaggagaaaaagtacgttgtatgctatccagaatgatgatggagagagctaatatcttaatgcttgatgagccaaccaatcacttagatctggagtccattacagcttttaataactcattgaaaaattttaaaggttccgtaattttcaccacacatgaccacgagtttgcacaaacagttggtaacagagtagtggaattaacaccaaacggagtcatagaccgttacatgacatttgacgaatacctggacgatgaaaaaattcaggaattaagaaaaaaaatgtacaacctgtaattttataatttataataagagaaatcccgttcgctagctgaacgggattttttttgatttattttttgccaaacagtttggcgagaatgaagataattatcgcaataataaaaataacgataaagataccaaagcccattccggctttaaaaatgtctccgataacttcgcagctcgtaaatgaaaatactattacaaataccattaacaaacgtttgattttattttgcatgactttgatgttttaagaacttgctgttctgattcgtataacttaaaattaggccaaagaacaagaaagatcttatatgatttaattaaaaagttctatgatttagagtaaaaccaactaggtgcaaaaggttaaacaactttacaataaagagaagtaaagataagggaaaggtaatgttctcttaaaagctattacgttttcgaacaatacttttgttcagtctaaacaaaaaaacgtatgaaaaaactttacttattatttatgcttctggggctaagttatgcttcaaaagcgcaaaatttatttccttatctgcaaaacgcgacaccaacatctatctacgttaactggaaaacggatagtaatccggaatctatcgtagagtacggaacaacagcatcaaatctaaatgttacggttaccggtaatacaaatgtttttacagattcaggttatccggggaattatttctatcatagtgcaaagttgacgaacctttcggctaacacgaaatatttctacagaataaaaaccggagcagatgtgtcttcggtttattcttttaaaacattgcccaatccgggacaagcagccacagctaatggacacattcggtttttgattatgggggataatcaactgaaagctgttccgcgttatgattctttggtgtcagctgctaaaagaaagataaaacagaaatggggaaaagacgcatctccggatgataatatctctatgacttttatggtgggagatcaggttgatgtgggaactttagatcattatgaaaatgtgcattttaaaaagaacagaggtttgtcaggtaatgtgcctattcagaccacagtaggaaaccatgaaacttatggaacgctgggaatgaattcctattacgatcatttttatataagtgaactttcatacaaagggatttcgtcgggaacagagaattattatgcccagcaggccggtaatgtcttgtttatcagtttaagttcagaacatacaggggctgaacagctaagctggttgcaaaaagttcttaccgctgcaaatgcggataataccgtagaatggattttctctttaagccacagaccttatcaggcagagcaatatgtgggggatatttcgacctgggttcgtaatacagccgtgccgctattggtaacttctccaaaatattcaatgcatattggggcgcaccatcatttgtatcatcgcggacaattgaaaaatacacctacctataatattatttcgggaggtacagcctgggatcaatattggggatcttctacagagcaggattttgatgatgtacagaaaaccatttgtaactggatttaccaaattgtagatattgatgtgacaaacggaaaaatggacattgaaagctattctattggaagtgttgataaatggaagaacaaccagctaatggatgaatttcatcgatataaaaacaaagcggcacctgccaaaccttcgattacgaatacttttactgcgacaaatacattgccgctaaccgtttccggatcgacttatacgacaactacagaggagaagttgaataccagtcagtttttgatttctcagacaccaacattcgatattgtaaagaaagaagtatatagagatttcgaaaatttatacggaaagtatggcactaagaaagattcgactgtaaacatcaatctgggtgtagatattaccaaaatggatttggcttctaattcacttccaaatggcaaatactatgtgaagttaagatacagagatcgtaatcttgaatggtcgccatggagtgatgttcagacttttacgattacaggaagtaacaatgtaaatacggcaatagttacagatgctgttacttattcgttgaacgcacccataaaagttgattttactgatgctccggccagtacttcaacgtggattggtttatacaaagaagggcagactccgggaggttcttcgccatcgcaaacctggaaatatacggacggaagtgccagcgggtttatcactttttctagcggactggctactaaaggacgttattatgctgcaatattttcaaatggagggtacacggaaattgcaccgcgaaaatacttttatgtagggccggtaccgaccttaacgactgataaaaccgagtattctgttgggactcctatccttattaattatacaaatggtccacaactggcaaaagactggattggtatttacagaatgggagttaatccaggatccggagttacagcaacaagctggcaatatgttacaacggctgcagatgctaaatctttcacaggactgccaaaaggctactattatgccgagtattatttacaggacggatttaatccgattggaaacaaagtattttttaaagtaggagcggtcgttaccgaattatggatcaataaaccggtttatgatttgggcgagcagattaccgcttcgtggacagacgctccgggaattgtaaaagactggttggggatttatcatgatggagataatccgaatgaaaaaccactggtgagttatacctatttcgaaggactttctgaaggaacaaaaaatattgcagctacggaattaccaacacaaaaagggaagtactttttggtaatgtttactaacgattcttataatgaagtttccaacagagtatcttttgaagtaatcgatccacatctgaacaacgatgaatttaaaatcgataatggtttgagagtctatccaaatccaacaaagaatgatacggaaacctttattcagtccgaatatcctattgatgaaatagaaatttacagcatggaagggaaattattatatgctacaaaaaatgtaaacaataataagttttctctaatcaatcaggatttaccaaaaggagtttatattctaaaaatacattcccgtaaattgtttacggctaaactaattgtgaagtagattttttttttttttttgaaaccccatttgcgtttgtaagtggggtttcgttttttaggttatgacagttcgtgttcaggaactgtcttttttattgattcttttatggtgtcaatttgattcagatgtcgtaggatatgatgaataaaaaactgaaaagtatctcccagttttaatcttagtaaacgggataaagaagtggggattttgatacgattcaaactcacctttttggattgttccagtagtgctaataattcaagttgttggttgatgaatttatcaattacacgcttgtcaagctcaaagtttaaaggatttttatctttaaaggttttcattttgttcagcttttcttttggaagcatacttttggcaaaataaccgcctaaaaatccactattaaaatgggtttcagaagaggttttcgagttctttatcttgtcttttatctgaggcaggtaataatcaccatacaaattcaaatgctccatgcattcgagaatgttccaggacgcaggatcttctttccacgtcaaagtttgtatgtgatcattcttaagtttctccgcctgattgatgctatctttcgtttgatcgattagtaattgtatgagtttttctgattgcataggttttatttttgaagcaaagtttcaaaaagtttttccggaaatgattgattgaaatcaagacttttttaatcgggataaagtctccggtgtcattcttagatagttggcaatgtgtttgtttggcacttcctgaaaaagctgcggacttctccttaaaactctttggtatctttcttttggagaattggttaaaatatcaatttcgcgttccatttgctgcactactaagttttctaaaatagtaatccataggtttttattgacttcaatttttaaaaactgatcgatttgtttttttgtgatgaccttcagaactgtttttttaatggcctgaatacacaggtcagaaggctttcctgttaagaaagaatccagtgacacaattaaattttgctggtaaccaaatcgaatgacttgttcgtcatcatcgtccaaaacaaaaagccgtaagcttccgctctcgaccaaataaatattgtcgtctatgcttcctcttactttaagaaattcatttctgtttagggttattgttttttcagaaagtgcaatgatttctttcatttttttgagcaattagtatcgtatgaatttcaatattttcggattttggatatttaatttcaaacgatttaatgattttgaaattatgtatagaaagctgtttttctatgttctttaaattgtgataatagaaataggttcggtcgccggtgcttcccgaaatgaaacctgattcagtcgaatgcccttcaacaaaactaagataaaaaataccaccagaacagagtattttatcaatgttgttgattagtttggaacaatcttcttcggacaaatagggcagacaaaaaccacaaataatggcatcaaattgttgatttactttgttgaggtctcgcgtgtccattacttcaaactgggcaaaaggattgttcttttgtgctaattcaatcattttgggagcaatgtcaatccctctaatttttaaattgggtttctttgataataaatattttgtgatgtttcccgggccacagccaatttcaaagatatgaagctgttcgtttttcaaagcatcgcaaaagaagtcgtaagtttcattatacagctttaaatccatgaacttatcttgataaatagttgcaattttatcccaggtttcgaaagtttctttgtattgatccatagctttaatcttgtgtttggtctgtaagcaagaagtataggtaagtgctgtactgctaaaatataattttaaatttagagacggaaatagtttttttgatgtagacttttagtctggtctccagctttaaagttttttttgacagtttatggtcggctcaaaatgattgggcaatggttccggtaaaatttaattagcgggttattttacgcataagggcttcaaatgggccgttcttaaagtgtcttgcccaaagtttactaaagtagtaactgagtgcaaagtacgcaattgaaaacagtaaaatataaattggttttgtcgctttcggatctgttgaatattggaccagatcattacctgttagtgcagaaaataaaatgatcccaatagtaagatgtgaaatataatgcgtaagcgtcatttgacccgttggtgcaaaattttgtacatattggttatttccgtttttttctccgatgtacataaaaaaggcaatcagcatcagagcaaatccggaggtgcttagcataaaaggaaggtacggagggagataatcggcattgataaataaatgtaaattctctgaaagtacaaattggccggacagtaattgaagtaatgctatcgatacatatagtaaaagtccaagcacaaacatttttttctgcattttgatgctgctccagtttagtcttccgagatacattcctaaaagaaaataagcaatccaggggaatacagcattccagccattgtaaaaagtatttctgataaacccgttcagggtataaaaatctttgtattgaaaagtggcaatgttccagcccgtttcataaggaacgataaaaattaaaaggtgaaaaccaaataccgccacagccgccagaaacagaaaaaaccttttgtctaaaaagattataaaagcaattatgaacatatagcaaccgtaaaagtgcaaaatatcggcaggccagatcaggttaagtaaaagtccgatgacaaataaaaaaccagctcgtttgaggatggtatttctcagcttgtttttctcggcagcagtatattccactctgttggtcataagtgcaatacccattcctgccagaattacaaaaacagaacttgagttgccgctaaaaagagacataaattgtgcaacagtactttggtcgttatgggagccaaaaaccatattgaaattaacaataaacattccgaagatggcatatgctcttgccaggtcaaatcctataattctttgtttcatttttttatattttatgaaacaaatgtcgaaatgaaaaatcgcgggaaatttgacttaagtcaaataatacatttaaattcgggaccggatcctgcttagcgtttccagcgatattccaagataagaagcaatatgtgtaagctggatgtttttaataatatacgaatgttctttaattaatttaaggtagcgggtcgtagcgtccagtgtgcgaaactgaaacaagcgatcctctagccaaatcgcgtaatattcggtaagcatcaaatctaattctgtcaattttgggaattgtttttttgcattctgaaatcctttaaagtcagtttgtgaaatggtgatgtctgtcacggcctgaataaattcgttgcttgtcgtttgcaggcaataactattaaaagacaccgcgatatcatctttaaagtataattctgtcgtgatttcttttccatcatcgaggtagtactttctaacaatcccttcttctataaaatagcttttactgcaaatttcatcttgccgtaataaaaaagctcctttttttaaagtcctggtagtggagatgttatttaaagcggctaaggtttcctgatcaaggttgtttataaaagcatctattttggtgagataggaattcattttttcggtatgtattcggtttttaaaagtaatcatagccaggatgattatttttctcctaatcttaggtgttttggttggtcaaatataataaaatagcaaaaaggatctgattaagttaagagatgttgatgaggttgtacgaaaggttctttgacttgtatagtttcatgagcaacgaattccaattttgtgctgtactattattcatttctacggaatttaaagagaatgctttgtgctattacaacgctaaaaatttattcaaatatttgtatttagaaagagactgcaaataaattctgattttgtatatttgcccaaccaaacattatacttaattatgagccaaaaagtattacttaattcaaaagaagttactatcatactccatcgtttggcttgtcagttaatcgaaaaacatcttgatttttcagatactattttaatcggaattcagccaagaggtgtttttttagccgaacgtttgaaacaaatattagaaagcgagtacaaaacgcccgaaatttctctgggttatttggacatcaccttttttagagacgatttccgccgcaccgaaaaaccgcttgaagcgaatagaacccaaatcaattttatagtcgaaaataaaaaagtcatttttattgatgacgttttgtttaccggacgaagcattcgttccgcgttaactgctattcagtcttttggaagaccttcagaaattgaattgttagttttaattgaccgacgttttagccgtaatctgccaattcagcccgattatcgtggccgtcaggtagatgctatcaatgacgaaaaagtaaaagtaagctggaaggaaaatgacggtgaagatgttgttcacttggtaacaaattagtttaatcggttaaccggttaattgtttaatcggaaggaatcgattaaacagttaaacaaataaacgattaaacagtaaaaacagttaaacattaaacatgaaagaattaagcgtagatcatttattgggaattaaatatatcaatgaaaatgatattaacctgatttttgaaacggccgatcattttaaagaagtcattaacagacctattaaaaaagttccttcattacgagatattaccattgccaatattttcttcgagaacagtacaagaactaaactttcctttgaattggcacaaaaaagattatcggctgatgtgattagtttttcggcagcccagtcttcggttaaaaaaggggagaccctgattgatactgtaaataatatcctttcaatgaaagttgatatggttgtaatgcgccactccaatcccggagcggcttattttttatccaaaaatgtcaaagccagtatcgtgaatgccggagacggagcacacgaacacccaactcaggctttattagacagttattcgattagagaaaaattaggcgatgtggccggaaaaaaagtggtcattgtaggagatattctgcattcgagagtagctttgtctaacatatatgctttgaagatgcagggagctgaggtaaaagtatgcgggccaaaaacactgattccgagatatattgaatcacttggtgtcacagttgaacccaatttgcgtaaagctttagagtggtgtgatgttgctaatatgcttcgtgttcaaaatgaacgtatggatgtgaatttttttccatcgacacgtgagtatgcacagcaatacggagtagataaaccgttactcgactctcttgggaaagaaatcgttatcatgcacccgggaccaattaacagaggggtagagattacttccgaagtggctgactccgatcattctgttattctgaatcaggtcgaaaacggagtagcgatcagaatggcagtgatttatttgctagcgtctaagattcaacagtaatgtgatatagttttcagtcgcggttttcagtctcaatattgacagggaaatttccctgagactgaaaactgagactgaaaactgagactgaaaactgagactgaaaactgagactgaaaactgagactgaaaactgagactgagactgagaactgggaataagaactgaaaactaaaaaaacttcgtaccttagcttttcaaatcagaagtgtatatattataaagatgaaagtagatcaaaaaggacataccgttaccattaaagatactcagggagattttaatgcttttttggaaagagtaacgcaacagtttaaaacctttgaaaaacaaaatattataatcgatttatcagcagatagtgatgtatcggaaaaagaggtgaaactttttttaccccttgccaagcaacagaagaaagccaaaaaatcatttgtaatagtagtttcagatctagactttaatgccgtttcagataaattagtcgttgttccgtcacttttggaagcgcacgatattatcgaaatggaggaaatcgaaagagacctcgggttttaattgtagattttagagttcagattttagattttgaatgttgaaatctaaaatatatattcaatctagaatctaaaatcagcaatctaaaattaagcttaccatacttggctgttatgccgctactcccagaacaattacgaaccctacttcgcaggttttagaaataagaaatcggttatttttaattgattgtggtgagggaacacaggtgcaacttagaaagaataagattaaattctccaaaataaatcacatctttatctcgcatcttcacggagatcacctttatggattaattggaactatttctactttttctcttttaggaagaacgaccgatttacatatttacggaccgaaagggattaaagaacttattctgcttcaattaaaattgacggaatcctggacgacctataaattgtttttccatgaattagagtcaaaagaaagcgaagttatttttgaagacaataaagttattgtaaaaacgattccattgaagcatcgcgtgtatacaaacggatttttgtttcaggaaaaacccggtgatcgaaaattaaatgtagaagcggttcagcaatacaatattcatacggcctattttcaaaaaataaaaggaggtggtgacgttacacttgacgatggaactgtaataaagaacaaagaattatcctttgatcctattccgtcaatgagttacgcgttttgttctgatacagtgtatcacgaagacgtacttcctataattaaggatgttgacgttttgtatcacgaatctacctttttggagtcagaagccgctttggcattgaaaacgttacactcaaccgcaaaagaagccgcaacaattgcacttaaagcaaatgcaaaaaagttaattctgggacattattcaacacgttacgatggtatcgaacgttttaaagtagaagccgaaaccgtttttccaaacacacttttgggagatgacgggaggagttttgagttttaaaatgtgagttatgcgttatgcgttatgcgttatgagttatgagttatgcgttatgagttataaatgacaaaatggtaaattgttttttctttttttttgtaagaatttgaaatcaaaaaaatctacaatctacaatctacaatctaaaatctgcaatctaaaatctgcaatctaaaatcaacaatcatgaacgatttaagcaattatagaaaatcttacgaaaagagtgaattattggaaaccaatattcccgaagacccaatcaatctgttcaaccgatggtttcatgaggtagaagattttggtgcaagcggagaagttaatgccatgacggtatcgacaattggattggatggttttccgaaatcgagagtggttttattgaagaaattctcggaagaagggtttattttttataccaattatgattcggaaaaagggaaggcgatagccgcaaacccgcatgtttgtttgtcattcttttggcaggaaatggaacgtcaggtcatcatcaaaggaatcgctaccagaacatcagataatatatctgatggctattttgattctcgtcctgatggaagtaaattgggtgcgattgtttcaaagcaaagcgaagtgattccgtcccgaacttttttggaagaaaatttgaaaaaactggaaaaagaattcgaaggaaaacacattcccagacctgaaaattggggtggttttttagtaactcctttagaggtagaattttggcaggggagacccaatagattgcatgacagaattcgttatcaaagtcaatctgacttttcatggaagatggaaaggttatcctcttagcttgtaggattattactttcgattgtaaaattattgcgtattttatcgatattatttgtagtttaacgataaattgaataagtttgagaaagaaacaagtcaatttattttaataaatatttaaaggatttgccccaacatctactttaaaaattaaactactatgtcattatgaaaaagatgatgcgtaacatgaggttcgttgcaatagttgccctacttgttgcaatgagctcctgttcagcggacagcgcagagggtagcgaaaaccctgctacagccgaggctgtcgttgctaactacaattacaatgattcagaaatcgaatcgatgaaacttatcaatgattatcgggtaagtattggtctgaatgctctgaaaggaatcaatcacgtttcatttaagtgcgaagaacacaacaaatacatgatcgcaaacaatgtggttgatcataatgattttacttcgcgttccaataatatcatgagtgttttaggtgctaaaaaagtaggcgaaaatgttgcttacaattataaaacttctgaggctgctttaagagcctggttggatagccccggacacaaggcaaatattgaaggagactatactcattttggtttgtcagtttcgattgactctaaaaccggaaagaaatactatacgaacatctttgtgaagatgtagagaaaatattggactggtttagtttttattgatcgttgtaattcagagaattgcaacgattttttttggctatgtatgaaattagttcttaaggtgtactgatgtaaaagtgggttagttgttctcaaagagtctaaataaagcataaggttaaacgctatgagtgacgaaaactatggttggtgtgaagcctaatcccaaataagtaaagaagacgaatcatacagattcgtttcacgaaagcggaattttaaaggagttatttacaagttttaaaaaaacaaattccaaattccaatcagtatttaatctgcttttggaatttggaattttagagtttaagatattacgtttttttagaattatttgaatttggttttttacaaggctgtgataataaattcgcttcgtctgttcatttgatgttgttcttctgtacacggtacaccatcagaacagccatttaccagttgggtttctccatatccttttccggttagtctgtttttagcgattccgtttttaacgagccattcaattgttgatttagctcttctgccggataaggcttcgttgtattgatgtgtagcacgactgtctgtgtgtgaacgaatatcaagtttcatcgttggatggctgtttaagacatcaagtattttttctaaatccagagcagcttctgtacggatatttgatttatccagatcaaagtaaatcattttgataccaaaacattttcctaaatcatcgccaatagtgactttacaggcggatttttccaatgcaataggaagactggtttttccggttagttttccaatggtaatattgatttctttggtggtatattcttctttttctgctcttacattatacgtttttccacattcaacagggaaactgtaaaaaccggttgcatctgaaatagtagtgttttttatattgcccagattgtcatacaaggttaattttgtgtttggtaaaacagataaggtttcagcgtctgtaatgattccgtttagctcttgtatgcattgcagttttcttgtttcgagaaatttgtagatgtcatcagaaccttgtccgccatctttattagagctaaaatagcctcttctggatacaggatcaataatgtaggcaaaatcatctttaggcgagttaacatccgctccaagattctgaatattgcttatggttccgttatcttcaatttgacctacaaaaacgtccagaccgccaagtccgggatgtccgtcagaagcaaaataaatttcattatcgctggtaacaaacggaaatgtttcttttccttgtgtatttatcactttacctaaattcacaggtgtgccataactgccattgccattgatgcttactttgtaaatgtcagactgacctactgttccgggcatgtctgaagcgaaatacagcgttttttcatcaggactaagtgcaggatgtgctgtactgtaattatcactgtcaaaaggaagttcggttatgttggtccattttccgttttcaagagtggctctgtatattttgattaaagtaattttgttgtcatcttttccttttttaccgtttatataattgtttctggtgaagtaaaccgtttgtccgtctttcgtaaaagcgggagaagactcgtgaaactttgtattaagtgatgttttgaatttattgactttcactgtactgttggcaggagggtctgtatcggcaaaatacaaattcgtaaaatattctccggtccatttgtgtttgcgttgtgaaaagtttccggtatcccgggcagaggcaaagtatattttaccgttgtaaacataggaactgtaatcagagtatttagagttgattccggcatcttcaattttgtatcggccggaattggctttgattttgtccagatagtttacatcctcggcatataattttgctctgtcatcgttcttagatttagccaaaaaatcagccataattttaccagccttatcggtttgtccgattgatttcagacattgtgcatatcgatagtaatactctggctcgacagcggtgttcatcgcaaataattcaccgtaccattttgcggcagcttcaaagttagagttgaagtagtgtgagtttccgagcttcttaaacaaatcttccgatttgtatcctttatcagctacacgttcataggttttaatagcgtcgatatacgcataattgtcgtagttcttatcggcagtattaattttcgattgttgcgcataactgccggctgaaaaagaacagataattgttaagcaaaggagtatataatttttcataatcgttatttttagaagaaacgtggcgttgtcattttaccattgtttttgaagaattcgtaacgcaggaatatctcatgtgatcctgaattatagttgtttaaacgtgtggtttcgcggtcgtaaccataaccaagataaagaccgtcagtaatctggaatcctaccatagcactaagtgaggcgctccatcggtaggccgctccaaccacaagtttatccatgaacataaagttggcagaaacatctacctgaagcggtgctccttggaccattttggttagtaaggcgggtttaaatttgatgtattgaagtctatcaagatcaaacacataacctgccattaaataatagttgattttatctttgtaaatggcataatcattatcactgtaccggttggtttcgataaaattaggtaccgataaaccaatgtatgctttatcagaatgccaatagactccggctcccacattcggtgaaaacttattgtttaaatcctgaaactgtggatctccctgactctccggatttaatttgctgacatccaaattgaacaggttggctgttcctttgataccaaacgaaagtttaaaatcggctgaggtctgaatagtataggaaaggtcaaccgaaaagttattttcgttagttgggccaattttatcatttattaaagaggctccaattcctaaattactattatttatagggctattgattgagaaagcgctggtttctggtgccccgtcgagtccaacccattgggtgcggtataatccaaaaacacttaaagctcctcgcgatccggcataggcaggattaatatttatggtattgtacatgtattgtgtaaattgtgcatcttgctgtgcatagctcgcaattgttacaaacataatgacgaagaaaaataattttgttctcatagtggtatttattattttcattagtactactttttatcaatttaaattgtaaaaaagtctatgcatttgtatattcaaaaataaggatttttttattaattaattgtaaattgtttctttatgtgcttgctatgcagtgagatatgtttagttttttatttcgataaataaagatatccgtcttttttattattctgtagtacattatttccgtccagtgatttgtagttaataatgtagaagtaagttcctgttggcagcccgtcagattgtttcacagtggttcggcctcttgaaattccatcaaaggcattggtttgattgttgtaattgtgtgtttcaaatactaataccccccaacggttatagatttctacatcattctcaggataacaagtggtatcgccaatactgtctatagtgaagacatcgttgattccgtcaccatttggagagaaagcattgtgaactactatacttccacaggcaagtactttacaatcatcatttattgccatattcagtacaatacttcttggacagctagcatcaggtattttgtattcgaatgtataattgcctattgccagacctaaaggattgaaattgtttccttgtatgctgttagtattactgttatctacccagattccgttagtaggagtattttcaggtaacaaggatagcaagttaataatggtcgaatcatcgttacaggctgtactactaacatttgttgtttcgttaggagttgctgtgattgtaacagttgcagttgcggtacatgcttgatttcctttgtttacagaagatgttgctgtaagcgtgtatgtaccggccggtaaattggtatttccaacagtttcatttttttcatttttaatgataacagttgagcctggactattagttaccagaatcgaaccagttcttccgttcgaacagttcacatttgtcgcaactccagatactgaaactttgttttgtaccgtaaaggtttgagttaatagtgttttattaccggcacaatctgttaaagtataggttcttgttaggatgtaaggacttccgtcacaaccgcttcctccattattggcgtcacttacagtaatgtttaccgtactgctgcaattgtccacagcattggtgatgtcgctcggatttccaacagggatatcagcaatagtttgcagatttgccacatttaccggagcggttcctgtaggtggagtggtatctctaacggttatgatttgagtgtaagaaattgtatttccactacaatcactggtggtccatttacgggttaaagtgtaatttgtactacattgattttcagtattactttttgtttcgctgaaaacaattggtaagttaccactacaattatcggaagcttccatatttgccggttgaggtacagcatcacaagaaacagtaatatcggcaggtagcgttcctgtaaaggttggttttgaagtatcctgaatagtaatcacctgagtgaaagtatctgaggtatttccacaatcgtctttcacagtccaggtattggtatacgttccggcattagaacaaccttcagaagctacaaatgaaccgcttacttttacgatgtttgagacattagtgtcgcaagcgtctgtagccgttgggaataaagcctgtgcggcagttaaagctgctgtatcgctgcattctactgttttgtttaaagaagcagtttgtgtagaccatgttggttttgaagtatcctgaatggtaatcacctgagtgaaagtagctgaggtatttccacaatcgtctttcaccgtccaggtattggtataggtaccggcattagcgcaaccttgagaggctacaaaagcaccgcttacttttacgatgtttgaaacattggtatcacatgcatctgtagccgttgggaataaagcctgtgcggcagttaaagctgctgtgtcgctacattctactgttttgtttaaagaagcagtttgtgtagaccatgttggttttgaagtgtcctgaatggtaatcacctgagtgaaggtatcagaagtatttccacaatcgtctttcacggtccaggtattggtatacgtaccggcattagcacaaccttgagaggccacaaaggcaccgcttacttttacgatgttcgaaacattagtgtcgcaagcatctgtagcggttgggaataaagcctgtgcggcagttaaagctgctgtgtcgctacattctactgttttgtttaaagaagcagtttgtgtagaccatgttggttttgaagtatcctgaatggtaatcacctgagtgaaggtatcagaagtatttccacaatcgtctttcacggtccaggtattggtatacgttccggcattagcacaaccttgagaggctacaaaagcaccgcttacttttacaatgtttgaaacattagtgtcgcaagcgtctgtagccgttgggaataaagcttgtgcggcagttaaagctgctgtgtcgctacattctactgttttgtttaatgaagcagctgcagtagaccatgttggttttgaagtatcctgaatagtaatcacctgtgtgaaagtagctgaggtatttccacaatcgtctttcacggtccaggtattggtatacgttccggcattagcacaaccttgagaggctacaaaagcaccgcttacttttacgatgtttgaaacattagtgtcgcaagcgtctgtagcggttgggaataaagcctgtgcggcagttaaagctgctgtgtcgctacattctattgttttgtttaaagaagcagtttgtgtagaccatgttggttttgaagtatcctgaatagtaatcacctgtgtaaaagtacttgaagtatttccacaatcgtctttgaccgtccaggtattggtatacgttccggcattagcgcaaccttgagaggccacaaaagcaccgcttacttttacgatgtttgaaacatcagtatcacaagcatctgtagcggttgggaataaagcctgtgcggcagttaaagctgctgtgtcgctacattctattgttttgtttaaagaggtagctgcagtagaccaggtaggagcagaaatatcttgtacaatgatcacctgactaacaggaagtgagatgtttccacaggcatcaacagcagtccaggttctggtttgtgtataggaacccgcacatccaccaggagtaataacatctttgtaagttaaggatgaaataacgccattattatctgttgcggtggcagtagcaaatactggtgtcgcaggacaattaatagtagaagtttgtggcagaggatcaattattggtttaatagaatccccgtcgataatagtaactgatttagatatggtacaagagtttgcatctgtaaccgttacggtataagttccggcggctaaattagaagctgtagctgctgttccaccagacggagaccataggtaagtatatcctggagttccaccggaaacagttacagtagctgatcccgtattatcacctccacagcctacattcatttgtgaagtggtagcggttagaattgttggttcagtgatggtaaaagttttagtgatggaacaaagatttgcatcttttatggtcacggtatatgttccggcagctaaattagaagccgttgccgcagatcctccggatggagcccaggagtaagtataggctccggttcctccggcaggagttaccgttgcagaaccatttgttccggcattacaagatacattcgtttgtgaagttgtagcagtcaatgcagctgcaggttcggtaatggttatagttttagtaatcgtacaaagattagcatctttaatcgttacagtgtaagttccggctgctaaattagaggctgttgctgcagatcctcctgatggtgcccaggaataggtataagctccggttcctcctgtaggtgttactgttgcagaacctgttgtatttgatttacaaagtacgttggtttgtgaggtggttgcagttatagcagttggttctgtgatggtaaaagttttagtaatcgtacaaagattagcatctttaatcgttacagtgtaagttccagctgctaaattagaggctgttgctgcagatcctcctgatggtgcccaagagtaagtataggctccggttcctccggaaactgttaccgttgcagaacctgttgttcctgcattacaagctacattcgtttgcgaagtagtagccgttagagctgcggcaggttcggtaatggttacagttttagtgatggaacaaagattggcgtcattaatggttaccgtataagttccggcagctaagttagaagctgttgctgctgatcctccagatggtgaccaggaatacgtataggctcctgttcctcctgtaggggttactgttgcagaccctgttgcatctgatttacaaagtacgttggtttgcgaagtagttgcagttatagtgcttggctctgtgatggtaaaagttttagtaatcgtacaaagatttgcatctttaatggttacggtgtatgttccggcagctaagttagaagccgttgctgcagatcctcccgatggagcccaagaataagtataagctccggttcctcccgaaacggttaccgttgcagatcctgttgctcctgaattacaagacgcgttggtttgcgaagtagtagccgttagagcagctgcaggttcagtgatggtaaaagttttagtgatggtacacagattagcatctttaatcgtcacagtatacgttccggcagctaagtttgaagcggttgctgcagatcccccggatggtgcccaggaatacgtataggctcctgttcctccggaaactgttaccgttgcagaccccgttgcatctgatttacaaagtacgttggtttgagaagtggtagccgttagagctgcggcaggttcagtaatggttacggttttagtgatggaacaaagattggcgtcattaatggttactgtataagttccggcagctaagtttgaagccgttgctgctgatcctccagatggtgcccaggaatacgtataggctcctgttcctcctgtaggggttaccgttgctgaccctgttgcatctgatttacaaagtacgttggtttgcgaagtagttgcagttatagtgcttggctctgtgatggtaaaagttttagtaatcgtacaaagatttgcatctttaatggttacggtgtatgttccggcagctaagttagaagccgttgctgcagatcctcccgatggagcccaagaataagtataagctccggttcctcctgaaactgttactgttgcagaccctgttgctcctgaattacaagacgcgttggtttgcgaagtggtagcagttaatgcagctgcaggttcagtgatggtaaacgttttagtgatggtacacagattagcatctttaatcgtcacggtatacgttccggcagctaagttagaagcggttgcagcagatcccccggatggtgcccaggaatacgtataggctcccgttcctccagaaactgttactgttgcagatcctgttgcatctgatttacaaagtacgttggtttgtgaagtagtagccgttagagcagctgcaggttcagtgatggtaaaagttttagtgatggtacaaagattagcatctttaatcgtcacagtatacgttccggcagctaagtttgaagccgttgctgctgatccccctgatggtgcccaagagtaagtataggctcctgttcctccggaaactgttaccgttgcagatcctgttgcatctgatttacaaagtacgttggtttgcgaagtggttgcggttaaagcagctgaaggctcggtgatggtaaaagttttagtgatggtacaaagatttgcatctttaatcgttaccgtataagttccggcagctaagtttgaagccgtagcggctgatcccccggatggtgcccaggaatacgtataggctcctgttcctcctgaaactgttactgttgcagaccccgttgcatctgatttacaaagtacgttggtttgtgaagtagttgccgttaatgcagttgaaggttctgtgatagtaaaagttttagtaatcgtacacagattagcatctttaatcgtcacggtatacgttccggctgctaagtttgaagccgtagcggctgatcctcccgatggtgaccaggaataagtataagctcctgtgcctcctgcaggtgtaactgtcgcagatcccgttgcatctgatttacaaagcacgttggtttgcgaagtagttgcggttaaagcagctgcaggttcagtgatggtaaaagttttagtgatggtacaaagattggcatctttaatcgtcacagtatacgttccggcagctaagttagaagcggttgcggcagatcctccagatggtgaccaagagtaggtgtatgctccggttcctccggtaggtgttaccgttgcagaacctgttgtacctgatttacaaagtacgttggtttgcgaagtagtagccgttattgctgttggttctgtgattgtgaaagttttagtaatcgtacaaagattggcgtctttaatggttactgtataagttccggcagctaagttagaagctgttgctgaggtttgtactggagttgtgttccaggagtaggtataaggcgtagttcctccggcaggagttaccgttgcagaacctgttgttccggcattacaggccacattagtttgtgatgtggtagcggttaaggcagcagccggctctgtaataatgatttgtttggtaccggtacatcctttagaatcagtagcggttacagtgtaagttccggcagccaagttagaagccgttgctgaggtttgtaccggagttgtattccaggagtaggtataaggcgtacttcctcccgaagcagttaccgttgcagaacctgttgttcctcctttacattttacgtcaacatgagaagcggcagtttctgttatcacaatgttagtttgacttacaacaacgggttttgtatcagaacaaccggattgtgtgttttgacctttaatgtaataagttcctactggcgctgcagttggggtattgtacggaatagtagcagctgcatcttgccaataggtgtaagtgagccctgaagtacttcctgcggtaacggctggtaaagtaaggtttgcagtcccatttacacatacaggcgcaggattagtgataaccaaagtgtttgtagcaaaactttttgcttttaaaaatacaccggcatcccatttttgatctgatgcgtcggcgatagccatttttattttataattttgtccaggcgtaacagcataagtagcagtaagaacaactgttgagccgtcatattccatggttgtagaagcaggagggttgtttacatagtatgaatcgtttacagcaggaaacgcaacattgtttacattggttccggcagagtgtatgttgtttatggttacggcatcaccgtttggcaattgcgcaagattgatcgcgttgttggtataggttccggtaattccaggaccacttaaaaagaatccaaaggcatcattaaattgtgtgtttacatattccagatattcttccgatgcaaaaacgaatttgaattctactagatttccatccgggataaaattgaattctaatatagaagcatcacgcatcgttctaccagagatggcactcaaatcctgatcatttgcttcacttaccatctcatccgatttgttggtatacgtattcggacccatggcagaactaattttacctgttgataaaagaagcccttcatcgataggaaaagttgaggttcccttgctgaaataacccaattggcggtctccagcagtggcagaccaggtatggttgacccaggtccaggtgttgttgttatttctgtaataaccgaaacgaacattacttatggtcaaacagccagaggttaagatattgcgaacaagttgatccgcactataagcattataacctgttgaggaattggcgacatcaatagagccggcaacagctgccagtgcactaacggcctctgtagaagctgctgtttttgctgtctttgaggttgccttgctatatggaagagtatttccatatctaacagggatttcctgagcaacaactgccgaagaatacatggctaatcctaaaattaaaattaaaaatgattttaaactaattttggaaaaggcatcttgttgagcatttttgtgaaacgggaaaaaataggtaccacatttaatgaaatttcccacttcttgtagagtagttttagttttcatattttaggattttgttttttgaagtacttgtgatattttaacagaaccaaagttataaggtgtaattaattttgattttttttctccgtaactaacctaaaaactcgttgaagtgtattttttttgttaaatgaagcgttaaaaaatactttttttagacatttttgataaataaaaaaggctctgaaatttatattttccattaaaaacagaattttaaaaatggtttaaatatttaatattcaattatttagcttgttttttgagaatagtactactatcgactaagtgcttgatttaatagatgaagaacactttttgctaaaaagagagattcttctttttttgatttttgagattttagacttaggcgttctttgttaaaattttgtttaaatgttaacagaagtaaaaaaatgaaaaggtttagaatttcttttgtaaattagaagttcaataaaaaaatcatcttcacttaagaagtttgtaaaccttttgcttatgaaaaacttaattttaatacgccatgcaaaatcaagttgggaagctccgttaaaagatttcgatagacctttaatgaaaaaaggcattttagacgcacacgatgtatcgtctacaattttagagtttcttcctaaaacttatataatgtggagtagtactgctgcaagggctctggaaacagcgctcatttttgcacagaatatttcatatcctctcgaaagtatcatttttaaagacgacctttatacctttgatgacagacaactcgaaaaagttatcaaatcatgtgataatagttttgaaagcgttattctttttggacataacgaggctattacaaattttgttaataaatttggggatgtttttatcgaaaatgtacctacgtcaggctttgtatcactacagtttgatgccgaaagctgggacagcattcataaaggtaaaactcataaaacaattttccccaaagatttaaaatagataaagtgtacgaacagaaatatatcgatagagaaaaaagttggttagcgtttaatgcaagagtacttcaggaagccggagataattcagttccacttttagacaggttgcgttttgttggaattttttcaaacaatttagatgaattttttagagttcgttatgctgcaattcgacgattaagcctttcagggatttccggtgaaaaatatttaggtggtgtttcagcgcaccaattaattaaagatattaccgaaattgttattcagcagcaatctgaaagtttgcgtattttgggaaatatcgaagcagaactggaagccgaaaatatctttattatcaatgaagatcaaattacaagagatcaggagagctatctgaaagacttttttgttcagaagttaagccctgaattggtaaccatcatcttaaatgatctggcagaatttcctgttcttaaagataccttgggatatttggcagttcgtctggaaatgaataccaatgacgaagttcgctatgctgttatcgaaattcctaaaacgataaacaggtttgtagtgctgccgtcagaagatgataaacaatatgtgatactgattgatgatgttatccgttacaatctgaaaaacatattcaatattttcgattacaaaagtgtttcggcacatatgatcaaaattacgcgtgatgcccagttggatatcgacagcgatttgagtaaaagtatgcttgaaaaaattgcatcatccgtaaaagacagaagaataggagagcccgttcgttttatttatgataatttgattgaagaagatacattgcgtttctttttggataaaatgaaaatcgttgaaaccgatagtataattccgggagggcgttatcacaacagacgtgattatatgagttttcctaatttaggccgatacgatttactgtacaaaccaaacgaacctttaccaattccgggtttgagtctggaaggaagtattttagaaaagatcagtaaaaaagattatcttctgcatgccccataccagtcattttcttatctgacaaagtttttacgtgaagctgccctggatccaaaagttaccagtataaaaatcactttataccgtttggcaaaaaactcacagattatcagttccttgattaatgctgcgaaaaatggtaaaaaagtaacggttcagatcgaacttcaggcacgatttgatgaggcatcgaatatttcctatgccgagcaaatgcaaacggaaggaattgatttgatttttggaattaaaggtctaaaagtacacagtaaaatttgtgtgatcgaaagagtagaagaaggaaaaacacgtcgttacggatttatttcaaccggaaattttaacgaatcgacggctaaaatttacaccgatgtaaccttgtttacctgtcatcagcaaattctgaaagatatttctaaaatattcgagttctttgatatcaattaccgagtgcaccgatacaaacatttaatagtatccccacattatacccgaacaaaatttatcaaattaatcgatcgtgaaattttgcacgcgctggctggtaggaaaacacatattaaattaaaaatgaacagtttgtccgattttaaaatgatcgataaattgtatgaagccagtaatgcgggagttaagattcaacttcaggtaagagggatttgttcgctaattccgggaattccgggaatgagtgaaaatattgaagcaataagtatcgttgataactatctggaacattcaagggtttatatttttggaaatgccggattgaccgaagtatacatttcatcagccgattttatgactagaaatcttgacggaagagtcgaagttacttgtccaatttatgatcttcaaataaagaaagaactaatagataattttaatattgcgtggaaagggaatgtcaaagtgagatatcattcctataaactggataataaatacaagcctagaaaccatcacgctccatttagagcacagttagaaacgtataagtactatcagaataaaataacagttcaggaagaagtggtgtagcgtaagcgattaattaaaaacaataaaaaataaaatcataagtgagcatgattaatataaggaaatttgcagcgatagatattggatcgaatgccatgaggcttctgatatcgaatgttgtagaacaagatggaaaagaaccccaatttaacaaaagttcgcttgttcgtgtgccaattcgtttgggacaagatgcctttaccgtaggagaaatttcagcagaaaatatagaccgaatggtggatgccatgaaagcattcaaccttttgatgaaagtacataaagtagaacgttatatggcgttcgcaacttcggcaatgcgcgaggcctataatgcgaaggaagttgtggcattaatcaagaaaaaagccgatataaaaatagaagttattgacggtaaaaaagaagccgcaattattgcttcgaccgatttacatcatctcctaaaaacagatgaaacttatctttttgtggatgtgggtggtggaagtaccgagtttaccttattttctgacggaaaaatgatcaattcgagatcttttaaagccggaaccgttcgtttgttaaataatatggtgcacgatgtagtttgggatgaaatcgaaaaatggatcaaaaccaataccgctgattatgaagaagtgaccctgattggttcgggtggaaacatcaataaactgtttaaaatgtccgggaaacagcaggaaaaaccactttcgtacatttatatcaattcacaatatgcttttctgaactccttaagttatgagcaaagaatcgccgaattgggattaaactcagatcgtgccgacgtaattattcacgctaccagaatttatctgaatgctatgaaatggagtggtgcacgccagatttacgttcctaaaatcggactttctgatggaattgtaaaagcgatgtattacggtaagatttagggatgtcaactttttttgccgcgattcgtgcgatgtgaacagttgaagcagttgcataatttgttcataccaaatatcaaagaataaattggtggagatttgtgaaattcgtggcaaaaaaatctttagaaatcttttgaatctgtggcaaaaataaatgttaaccaacaaatacaataaatgaataaaaccagacttgaggcttttagtgatggtgttttggctattattataaccattatgattttagaaattaaagtaccggcaggtcatgaattcgccgatttaaaaccgctaattcctaaatttctaagttatgttctgagttttgtttatgtgggtatttactggaacaaccaccattatttaattcatagcctgggtaaggtaaatgggaagattctttgggctaacttgcatttgcttttttggctttccctaattcctgttgcaactggttggatgggcgaacataactttgccaaagcctctatggctttgtatggaactgtattgcttttatgctccattgcttattttattttgcaacgcattataattcttaatgaaggagtaaattccacgttggcaaaggcgataggacgtgatttaaaaggacatacttcttcggttttgtatatttttggaatcgtattttcgttttataacgagtggatttcaggtgcagcttattttattgttgctttattatggctcattccggacaaaaggatagagaaagtttttgcctctaaaaattaatttattttgagtttataatgaaatcagtttttcaatccattaagaatttaccgcaggaaatattagatcagttggatgatttaattacagtccgaaaacttaaaaaaggtgattttttattgagagaagatcaggtttgtagtgaaattgtattgatcaaaaaaggaattttaagatccttctttttcaatcaccaaggcaatgagattaccaattgttttgcttttgaaaacgaatttatgggatcgttttcgagttttattacacaaaaagttgctgaagaaaatattcaggcactcatcgatactgaaattgaagtcatcagtaaagatgggatagagaaactgtatcaatccagtatttattggcaggaagtgggtcgtaaaattgcagaaatggagtatgtggcgttgcaaaaaagaatggtttcttttcaaaaattatcagggactcagcgctatgaagaactttatcaaaatcataaaaattatattcagctgattccgcttcaatatctggcctcttatctgggggttactccaagacatctaagtcgaattcgcaaagcaattttataggacatttgtccggttcctaagagaggtttctctattatttttgtttcaaaaaaaatatacaaatgggaaaaaatattcttatcatcaacggtcatccaaacccatccagttttaattttgcgattgcagaatcttattttaaaggggcaatcgcttcgaaagccacagtggatacaattacaattgcaaagctggattttaatccgaatttgcaatttggctatcaaaaacgtatcgagctggaacctgatcttctggcgtcttgggagaagattaaaaaggcagatcatttagtttggattcatccggtttggtggggtggtttgccggcaattactaaaggatttatagatcgtttgtttttaccggggatggcttttcaatatcgggaaaattcggtttggtgggacaaattattaaaaggaaaaaccgcgcatattataaccactttagatcagcccggctggtattacagattgttttacggaagaccaagtgtcaaccagcttaaaaaagctatactcgaattctgtgggatcaagccggtaaaagtgagttatatcggaattataaaaacagccgatgaaacgcaaagaaaaaaatggcttcaaaaagtatacgattggggattgcttacgaaatagaacgttaagaaggtaaatctaatccaaatgttgaacgtaaaagttcgatgtttgggttgatttccaggaagcgattgtatcggtcctgatcgttaagactgcgtttaatttgaatggtttcattaacatgagcctcaatggtaatatcatgattgtgtaaatgaccttttaaatgccctaaaagcccatacatctgaccttcaaaatccagtttagaaccttcgttgggtaattcaaacgtgattactgttccgtttaatttagggtcattgatcaacaataaagactgcataattttatgacctttatcacccaaacgctgagcatatttgttccattgcagcaacatttccgtttctgtaaattcttccgtaggcagttcggtagtcggttttacaaccgttttattgttggcttccagttcttttttcttgcgaatactggataaagaaaaggcagaaaccttgggttctgtacttgtttcaggctgaggagctgctggagcttccgctttcggtgctgaagcagtttgttcattttgtggagtggcagtttctggtgtgtgagtagcttctgcttttgcagttttaacttcaactatagaatatccgccatttttataataagtagggggaattatgaattgctcaacttttttttttctccatcaaaattgatagaggccaattgcatcaaacacagttcaaccaaaagacgttggttttgacttagtttgtattttaaatcgcagtcattagcaatgtcaatgccttttagtagaaaatcctgtgaacatttttgcgcctgaacaccatacatttgctgcgcctgttcgcctacttcaagtaaagcaattgttgcaggagttttactgaccagtaaatctctgaaatgcgaagccagtccggcaataaaatgatgtccatcgaagccttttgcaaggatatcgttgtacgccagtaaaagatccggaattttattttctaaaagtaaatcggtgatactaatgtaagtctcgtaatctaaaacgtttaggttttcggttaccgcctgacgtgttaagttcgttccacaatacgaaaccacacggtcaaaaattgataaggcatcccgcattgcgccatcagccttttgagcaataatgtgcaaggcatcgtcttcaaaattgattccctgacttgcagcaacgtcagctaaatgttctttagcatcttttaccgtaattcttttgaaatcaaaaatctgacaacgagataaaatcgttggtataattttatgtttctctgtggtagccagaataaaaatagcatgttttggtggttcttccaatgttttaagaaaagcattgaaagctgcagaagacaacatgtggacctcgtcaatgatgtacactttatattgtccggtttgcggtgggattctaacctgatcaatcagattacgaatatcatcaacagagttgttggaagcggcatctaactcaaaaacgttaaaagcaaaatcttcgtttggatcatcatatccgggctggtttattttacgggccaggatacgtgcacaggttgtttttccaacaccacgcggtccggtgaataaaagagcagaagcaaggtgattgctgtcaatagcgttcaacaaagtgttggtaatggctttctgtcccactacatctttaaatgtttgtggacgatatttacgtgccgatactacaaattgttccatattctgttttattcgttagcaaatataggctgaaaattgccaaatcacaaatctgaaatcgataaatgttggagttgtttttgagtgttttgaatatgagaaagtaacgttttagaaattaaattttggcactgaaaaaaaacggaagatatatttttttttgcttttcatgtttaactttttcttatgaaactgattgcgacctattggtcagaattcaggtttaaatttatatttttgatgcaatcctttagggaaatctaaaaccaattaaaattgccggatatgaaattatttttttcgactttgcttttggttaccacatttattgtgaaatctcaaactgcagcttcagacaagccggtttatcaactacgtatttatgagatttttgagtccaataaaaatcagttccatgaacggtttcgcgatcacgccatgcgtatcatgatgaagtataattttaagatcacctccatctgggaatccaaatcggacaaaaaaacagagtttgtttattttctggaatggccggacgaatctactatgaaaaaagcgtgggaaggttttaaaagtgatccggaatggatagcgattaaaaaagaatttacagcaaaatatggtaatgtagtggggaatattgaagaccggattttgacaaagacggattattccccaaaatgatccctgtgatttttttaaggtttgtttagaggttttacactctgaaatttacaaagagtattacttcagcagcaggtatgttgtgggttttgcttcaaaatatttgaaacgtgcgtctcgttggtaaatttagccgcaatctcattttaactccttaatttttatgaaaaactatttattggtaattgtatttgcatttttttcgtctgctcttcaggcacaaaccgctcaggattcgcttgatatcaaacgtgtggctttggcttacatcgaggcgcaacaccatccaaatcctaaattgatggaaagtgctttgcatccccgattggtaaaacgatctgtctttagaagcaaagccgctcagaaagattatatttcagaatactttgcagagaatatggtgatccttgcggaaacatataatgcgaagggagacaaattcccgaaaaaccccagaaaggaaataaagttattggatgtttcggcacgaacagcatcagtaaaattactggccgatgcctggattgattacatgcacatcgtaaaaaccaatggggaatggaaaatcataaatgtgctttggcagtacaatgatgtgtcacagcatgagtagatgtttttcttttttttaagaaaattttgcaatgattttgttccgttaaggtataagttaccaatttttggtaattttacagtactgaataaaaaattatgggaaaaaataaatcaatatcgcttggagatcattttgagcacttcattgaaaatagcctttctcagggaagattcaaaaatgccagtgaagtgatcagagctgcattacgccttttagaggaagaagaaaatcgtttgcttcttttaaaaaaagcggttcaggatggtttggacagtggtcgtgcagagaattttgatgccaggaaacatctcgaaagtttaaaagcaaacaagagaaatggctaagtattatttaacgaataaagcggttgaagatttagctgaaatttggaattatacttttgaggagtggtcagaaaataaggctgatacatattatgagcagcttttgagttcttgtcaggaagttgcggatgatccaggtcttggaagaaaatatgatatggtaaccgaaaaattgcttggttttaaaacaaatcggcatattcttttttatcgaattatttcagatagtgagattgagattgtgagaatccttcatgaaagaatggatttgaaaagtaagttttgatttttattggtctcagattcgggtttaaaaccctgcaatttattgcagtactttagtaatgcgaaaaaatctatatcttgggtattccggaattgttcagagtgaggttctgtttaaagaagacggtacaggaactaaacgtctggtgagttatctagttgccgaagaaggattttcagagtctgatttgaaatcgtatcttttaggattggttccggattatatggttcctcaggtgtttgtggttttagatcagatgccattaacttcaaacggaaagatcgacagaaaagcattaccggatcctactgttacagaagggcgtgtgtatgtagcacctgaaaccgaaaccgaaaaagatttgactgcgatctggcaggatttactcaaagtagagcaagttggtgttaccgataatttcttcgaactgggcggtgattctattattgtcattcaggtagtcagcagagcaaagaaaaaaggatatgaaattcaggtgcaagacttgtttgattaccaaaccatagcagatttggctgtggctgtagagcaaaacagtcaaagtcagagcacagctgaacaaggacttttagagggtgaagtgcctttgtcgccaagtcaacagtggttttttgagcaacaccaggaagcactttcacatttcaatcaggccttccttttaagtataagcaaagaggtgaccaaagaaaaattagaacaaatcgtaaatctaattgccaaacgtcatgattcgcttcgctttagatataccaaacaaaaagaggaatggaagcagttttatggggaatttacaaatgtcttccaaactgaaactcttgaggaaagtaaaaacactagcgaagccattaccgcaatttgtgtaaaacatcaggaatctctggatattgaaaaaggagatatcgtacgatttgttttgattgaaacaccggaggctgaggttagcaacagattctttatggtagctcatcaccttgctgtagatagggggtcatggaggtttatcattgataatttcgaaaccttattaaaagaagaaacgataaatgaaacgctttatttggccaataaaaacaattcgttcagagattgggtatataaattgaaagattttgcagagacagaagaaatagaatcgcagttatcatattggcagcaagttaataataattacacgccgattccaaccgacttttcaacaaataaaccaacacgagcgaccacgaaaacgcatgatgtaatgctgaatcaggaatatacaggcagtttgttgaaagaagttaatgaggcgtacaatactgagattaacgatttaatgttaagtgctttacaaatgacttttgaagaggtattccagatacagcgactggcgttgggatttgaagagtacggaagagaaaatctattttcgaacattgatctttcgggaactacaggttggtttaccaataaataccctgtgattttgtcccgagatggagtgacaacagaaggcgatacgatcaaatcggtaaaagaaatattgcgtaaaattccaacaaaaggaatggggtatgggtgtttgcgttatttacactcttctgaggaaacacgcaattcgttaaaagactgccgatgggatgttgtatttaattatctggggcagatcgataatgtaatcaacccaaaaggaatcttcacagcggcctcagaatattccggagccgacatcagtcctgctgcaatactagaagaaaagtttatcataaaagcaattattgttaacaatgagcttaaaattgcctgggactattctacagagcattatcgtcctgaaacagtcaaaaaactggcagatcaatttatagtcaatttaattcagttaatcaaacactgtatcgataaagaaggcagggaagtaacaccatccgattttgggttaagtgacgtattggattttaaagaattggacgagttgtttgaaacagaattgcatgaaaatgctgaaaatgaagtagtcttgagattttaaaaccgatctggccttagaatccctgttgttaattttatagcactgtatcagtttgataaattgtaaaaactcctgatacagttctataactttcaaatacttacacacaaacaagtattacggtatctaatttataaccaaagcaaaaaagtacatcatcaattggagggagtgaattcaccaccgccggaaaagatattttaaaattatggaaaagtttattcaagaattaaaagaactcgatttataccttaaaatcaatggtaaagatctgctgcttgtaggcaaagagggcaacttaacggcttctgacctggaaaaagtgaatcgtcatggtaacatcatttcttttataaaagacaataaaaaagagctgttcgactttttaaataaaaacagttttaaacttcaaagagagaacgtagcttcaatttatgaactctgtcctgcacaggaaggaattctttttcatagtttatacttatctagtatgggtgaggaagattatgcgaccaatctgacccaaaattcaatggaattcacctcagaaattaatgtagaaatctttaaaaaagcctggcaaaacgtcattgaaaatcacactacacttagaacaggttttattaccgatgcagtaaaaatacctgtccagtttgtaaataaaaaagtagaagtcccttttctgttttttgattacagccaattttctcaggaagaggcaaatgaaaaatttgaggcatatcgtatcaatgacgctaaagatggattttcttttacaaaccctcctttgatgcgcattactttgataaaatttaatgaagcccgatatacaatgatctggacaaggcatcatattttattagacggctggtctactcaaattttacttaaagaacttttaacgttttatactcaaattgtaaaaggtatagagcctgtagtccaaaaggaagatctttttgaagatcacataaaataccttaaagcgatcgattcttataaagaaagagctttttggaaagagtattttaacgggtttgaacagtcctccctaatgccttttacttcggaattgttggaaagaaataaaggaaaaggagcgtacagtagagaaaaacttgttttagataaagagtacactcaaaaagtagttgcgctttcaaaatcatttcaggtaaccaccaatacactaatgcagggggtttgggcaatcgttttgtcaaaatacaccaatctgcaagacattatttttggcgtaacagtttcagggcgtccggctgatttggactatgataataagttggggctttttatcaacacgcttccgttgcgttgtaaactggaaaacgatgaaaatattggcgatttttttcgaagaatacagcaggaaaacgcagcgataagaaattttcagcatacagccatcaacaccattaaagaactcaattcgatcaaagaagaactattcgattcattatgggtctttaacaatttcccggttaccgaacaatcagacgctgaaagtaaagagttaagcgttgaggatcagagttctaatggtaatacaaattatttaataactattcaccttgttttaaaagagacacttggcatgttcttttcctacaatagtgatttgatagaggaacagtacataaaaatgatgtgcacccacatcaaaactttattagatcagctgttggaaggaaaaagcaccatttcatctctaaatattctttcggcaaaggagcagacgatattattaaacgactttaacgatacggctgtagaatatcctagagacgtgacattggtagatgtttttgaaaaacaagttgcaaaaactccaaatgcaaccgctttagtttttgagggacaaaaaatgacgtattcagagctcaatttcaaggctaatcaattagccaattatttaatcgaaaaaggggtgcagcctgacaccttggtgggcatttgtatcgatcgatcttttgaaatgttaatcggaatactaggaattttaaaatcaggaggagcttatgtgccaatagatcccgaatatccggaaagtcgtgttgattatattctggaagatactcatacacctttagtgctggttggaaattctactgaagcattaatcgagcagttcaaaggtaaatcagttgtaaatctggagcaatgggactccttatttgcaggctattccggagaaaatacagcgaccaaactgacgccgtcaaatttagcttatgttatctacacttcaggctccaccggacagcctaaaggggttatgaacgaacatttgggagtggtaaacagattgttctgggcaagagattattataagctgaacgagaatgatgttttaatacaaaaaactactttcagttttgatgtttccgtttgggaattgttgctgcctttgcaagtaggatgtcagttaataattgcaaaaccgggaggacacaaagacagcgattatttaattcagttaatcaaagaatatcatgtaagcatgatacatttcgttccgtctatgttaagcatgtttttgcttgatatagacgcggaagccgctatcgatttaaaaaatgtagtttgcagtggagaggcattaaaaaccagccaggtaatagaatttcaaaagaaactgcctactacgtgtttaagtaatttatacggtccaactgaggccgcaattgatgtgacgagctggatagccccgtcaggatttaaaaacaatgataatgtagtaatcggaaaacctgtagcaaacacgcaaatcattattgtagatcaggagatgaaattagttcctgtaggcgtaataggggaattgtgcattggcggagttcaggtagcaagaggttatttgaatcgtcctgaccttaacgaagataaatttatcgccaacccattccattctggaaggttgtataaaacaggagataaagcaagatggctggcagacggaagtatagaatacattggacgatcggacgcacaggttaaaattagaggttatcgaatagaattgggagaaatagaacatcagttacaagaaatagaaggtatagtaaaagccgtcgtactggttaatgaaacggaagctggtgacaagcagctaatagcctatgtagtatctcaaaaaaagcaggaagcaacaagcataaaagagtatttgtacgataagcttcccgaatatatggtaccagcgcaaatacttcagatcgaaaaaattccaataacaaataatggaaaactagacaaaaaagccttaaaatttttaaataccgaagatgttgtaccacaagatatttttgttgcaccaaaaagtgaaacagaagaaaaagtacagaaaatttggaaaaaagtattggaaattgaaacaatcggagtacacgacaacttctttagaattggaggacacagcctgcatttgatgcgactcgttaacgaatttaataaagtattcaacattaggctgggcttaaaacaattgtataaaaacccgaccatagaaactcaagcattattaattgcatcatcacaattttctgcttttacaagtattcctaaaattgcagaacgcgaagcatatccggtatccgacgctcaaaaaagattgtggctgttaagtcagtttccggaaggttctgtggcatacaatatgcctgcacaggttactttgaaaggaaaacataatatagatgacatcgaaaaagccattaatttggtgatcgagcgacacgaaatattgcgtaccgtttttaaagttcattctaatggagaagttttacagcatatcttaagcccgaaagagttgggattcaaagtagattttcaaacccttagtacagttgaagcaacagcttatataaaacaagattcttttaaagtatatgatctggagaaaggcccgttgttaagagtaagtgtactccagacggaagacgaaatatatgttttgtattttaatatgcatcatattatcagcgatggatggtcgatgaacgttttgaaaaaagactttttgttctattatgaaagtatccgaaacaagcgcaatgatactttgccggctttaagaattcagtacaaagattatgcaaactggcagttagaagctttagagcgtactacagaccatgcagacaaaatattttggatgaataaactccagggggagttgcctgttttggatttgccttcttcaaaagtcagacctaacaaaaagagctataacggaacaaagttactggcacatctgggagaaaaagaagtaaagcagattaaagcttatacacaaacgaatggcggtagtttgtttacctttttactgacgacctggaatattatgttgtacaattatacagcaaccggggatattgttatgggaactccaattgcaggacgaaatcattccgatttatcagatcagataggcttttttgtaaatactctggcattgaggaatcagatacagcctgattatagtttcgaccgattttataaagaagtaaccgagtcaactcttctggcattcgaacatcaaaactaccctttcgatcgtttggttgaagacctgaaagttaaaaagaacagcagcagaagcgttgtatttgatatcatgctgattttgcaaaacgcacagcagtcgagagaagataataccagcatcaacgcttctaatatagatcgtattttgaatttggggcagactataacaaaatttgacctggatatcaattgtaaagaatttaacagctacctgtcttatgaaatctcattcaacaatgatgtttacgacacagagatgatctctgatttgatggggcattacaaacaattggtaaaaaacatcttaaagtcttcaaaattggcacttgcttctatttcttatttatcagaagaagaagaaacagaattgctttatacgtataatgatactaaagccgagtatccgtctggagaaaccgtattggatttattcaatagtcaggtccaaaggagaccggaagccattgctgtaattgctaataatgagcgtttgacttataaagagttagccgaaaaatcaacgcagtttgctttacatctgatgagttgcggcgtagaaagagacacgctcgtaccgatttgtatggacaggtctgtagaagtaatcattggtttattaggaatactaaaagcaggtggagcttacgttcctatcgatcctaactaccctaaaaaacgaatcgattttattatagaagacaccaacgcaaaaataatagttacgaaaaagaaattctcctcattattccatgcttttgaaaccgaaaagagtgtaatatacctggatgttttattacctgaaattcaggaggtatcgactgctgattttgcgaataaaatcagtccggaacaattgattaatgtcatctatacttccggaactacaggtcagccaaaaggagttatgattgagcacaagtccattcttaaccatgccagatggagtatcaaaaactataaattttctgagggggataatgtcgctaagtacttaaattttgctttcgatgcttcggcagaagaaatttacccgacacttttatccggagccacattaaactttattcctgaagattgtttgaccaatattccccgcttaaatgaatatttgatcgacaacaatatgtcggtactggttcttccttccgtaatgttacaggaatttaccaaatgcaaaaacactaccctaagaatgctgatcgttggaggtgaaaaaattgaagatgcgaacaaaaataattttgaggttttcaaccattatggacctacggaaactaccgtaacctgtcttagttatcagctcaaaaagcagaacaaaaatatttttgctcctattggaaatccgatagacaacgcctctgtcatcattttagatacaaatggcaaattggttccaaaagggatgataggggaattgcacatcggaggagtcggactatcgagaggctatttaaacaacccaattttaaccaatgaaaaattcgttaccaatccttacaacagtaatgaaaaattatacaaatcaggagatttagcaagacgattgccagatggtaaaatagagtttattggcagaaaggatgaacaggtaaaaatcagaggataccgaatagaactgggagagatagaacacgcgatcttaaatcttgaagaaatcgaaaacacagtagttcagatcagaaaaagtactactggtgagaacgatctgattgcttttatcgcggctacaaacaaacaaaaaacttctcaactaagagcctctctaaaagcatatctaccggactacatgattccgtcctattttattcaggtcgatcagtttaaactcacctctaacggtaaggttgataagaaagatttagaaactttcgacctttctacaattgttgcaggagaagaatatgtggcgccaagagatgaaaatgaggaaaaaatagctcaggttttagcacagcaattgggaaaaaatacagaaagtattggcgtattcgatcagttctttgacataggggcaacttctatacgcttaatgacaattgcaggagaattaagtgaagtattcggaatagaaataacagtcgtaacactatttgaatatgctaacatagatcagctaaatgaatacatcaaagcccatcaaaaccctgaaaaaacttcaaaagaagaggaagaagacctgtccggcgtcttagatgaaataattgatttaatgtaaatagtaatactcttttaatcatgaaaaatacttcaataaaaaaggacattgccatcatagggatgtccggaaaatttccacagtcgaaaaatattgagcaattctggaaaaatttgcaggaaggccaggagatgattcatttctattctgaattggaacttaaagagttaggaattaacagcaaagaaaaagatccaaactttgtcggtgtcacctcaagaatcgatgatgcagaatgttttgattaccagttttttggttacactaaagatgaagccgaaatcatggatccgcaaaccagactgctgcacgaacacatctggctggcccttgaggattcgggcaccaaaacaacgcattacggtggtaaaattggtttgtacactgccgtaaatgataactttaattggaggttacatgctaaagtatccaataacaataaagtaaatcctttttacgccaatcagctctccaacaggagttttgccaatactttaatttcttataagcttaatttgaaggggccaagccttattgtagataccgcctgttcaagttctttggcggccgtgcatatggcttgtagaaatttattattaaaagaatgttcgattgccgttaccggaggagtgaaaatactaacccgaaaagaaacaggctacaattacgaagaaggaatgatctattctaaggatggtcattgcagggcatttgatgaatcgtcatcgggtatagtcaacggagaaggtataggtattgtagtgctaaaaagactagaagatgccttaagagatcgtgacaatatttattcggtaattcgtggaacagcacttaataatgacggtaaccgaaaagtaggctatacggcaccaagtgttcagggacaatacgaatgtatcaatctggcacacagaatggctgatgtaacaccagaatcgataggatatattgaaacacacggaacggctacgaaattaggagatccgatagagatagaagccctaaacaaagcttttaattatgataccaatcattcctgtgccatcggatctgttaaaaccaatattggtcatttggattctgctgccggaattgcgggtttaattaaagcgacaatggtaatcaatcaaaaaagcatacctgaatcgttacattttaaaattccaaacccacagatcaattttaaaaaaggccctttttacgtcaacacaaaacaaacagcttggaacaatcatagtccattgcgtgcaggagtaagtgcttttggtataggtgggaacaacgttcatgtcatattagaagaagcacctgaaagagcggcatctgaaaccaataatccttattatctactgcgttactctgctaaatcacagtggtcactggataagtttcaggaaaatttgaaaacctttttagccacaaaaaaggacacaaaactagccgatttagcctatacactgcaaaccggaagagaccagtttaaatacaataggtttttggtatgcaaaagcaaagaggaggcccttaaaatactagagagcgaagatcaggacggtttattttccggaaaattaaagaatactggtaaagtagcatttatgtgctcgggatcgggttctcaatacttaaatatggggaaagacttgtatcatgacagtccgtacttcaaagaatatatcgacaaaggttttgcgtacttagaaagagaaaccggaatcgattatggagccatcctgttcccgaacgagcagtcggcacaacaaacgaacaatataaatgataacatacatacacaacctttggtttttgtttttgagtatgctgtagccaaaaccttgatgcatttagggattaatcccaattatttgatcggacatagtacaggtgagtacgtagcggcttgtttaagtgggatctttacttttgaagccgccttatccttattgattaaaagaggggaattgatgtcagcagctcctaagggaagcatgctaagtgtaagtttgtctaaagaaaaaataaccgcctatctaaacagtgatgtaggtcttgcggtaatcaattcgcccgaatcttgtgtagtgtcaggaaccattgagggtattgatgcactcaaagccattttggaagaaaaagatattgcttgttcaagaatccgagtttcacttgcaggacattcttttttgctggattctattttaaaagaatttgaagaagcattccgcaatatcaccctgtctgaaccaacaattccagtattgtccaactataccggagaaatactgactaaagaagaagccacttcggtaacctattgggtcaatcatttaagaaacaccgttcagttttcaaaaggactacagcaattgttaaccattaagaatttggcatttttagaaattgggccaggaaatgcactaacaagtgtatttaagcagcacagtaaagaaaatatacacgaccatatagcacttaacatgctgagacatccaagtcaggaaataaatgatactcagttttttctacagcaattaggagaactgtggtttcagggtatcgatattaattgggaatcctattatggcgattatttgcccaataaaatttcggctcctgcttatgtttttcaccaaaccaaattcctggcacgtgttaatcctcttgacaatttgaatggtaacgctttcaatacctttgaatatgaagtagaggataattttaacgaagacgaagaaatgtacaaagaagatgcggatagggagttaatgaataccccctacaaggaaccctcaactgatacagaaaaacaattagtagaaatttggcaggacttcttcagtattaataaaattggaattctggatgacttttttgcgctgggaggtaactctttaaaaggagtcaccatgctaaaactgattcagaaaacattcgagatcgatattaaaattaaagatttttataaaaaatcaaccataaaagggcttgcggccgaaatcgatctggccttaaagtttgtgatcattcaggaagaagagatcagcagtaaaatggtaattacgatctaaaaagaatagattttttttcattctaaacacaaaaccacaccacaatatttttattaactatttgaaggcaaaacactttggcttctaaaaacacaatatcatggttgatttattaaatgaaatacatcagaacaatataacactgtctctagacggcgaaaatcttaaacttggttttaaagatgaggtgatggatgaggtgcttatcactaaaataagagataacaaacaggaaataatatcttatttaagtaaatacaccctgctgaataaagaaaacaggattacgaaagtagaagcgggcgaaagttatgaagtctcttccagtcagcttcgtatgttgtcttctatattaattgatacgggtgtcaaaggatataactattcaattcctaacttggttcgttttcagcaaaaaataaatgtcagccattttaagcaggcagtctacaatacgatagaccgacatgaatctttacgtaccgtatttaaaattaacgaagaggggcaaatccgacaatacgttctccaaaaagaagacataaattttaaaattgactttcaggatttcagaacacaggaagataaggaaaaacaaataaaaaacattacgaagaacgacaaagaaaaaccgtttgatatagaacacgggcctttgttacgcatttgtttatttcaattagcagatagtgaattcatcctgtattgcaatattcatcacgttataagtgattcctggtcgctggatgttttatttaaagatatttttgaattttactctgctcttgaatcgggcgtagaacacaagttgccagcgctgaatattcagtacaaagattatgcggcctggcaaaacaaacaattggagaaaggtctttttaagaaacaggaagactattttaaagcaacattttcaggagaaattccggtgcttaattttgccaataataaaaccagacccgccgagagaaccatcaacggatttgctcttaagtcctatctttcgaaagaaactacgacagcgttcagagcactttgtacacataacggaggaagtgtctttatgggattattggccgtatggaacgtgctattttacaaatataccaacagcaaggatattattataggtacagcagtagcaggaagagaccatgctgatttgaaggaacaggtaggctgttacatcaattcattgccccttcgaaatacaatagatcccgggcaaacttttaacgcattttttaatagcgtaaaagagaatacgcttgatgctttaaacggacaattttacccatttgaacgcttggtaaaactgataaactataacagagagcgatcaagatctcctttatttgatgtaatgcttttattgcaaaatgcagtggatcatagtaatattacgttagaggaaaaccaaataggtgctataagagaattaggaaaaacctcggcactaacagatcttgatatcaattttcttgaagaaggagactacttatcgtgtcatttagcatacaatacagatgtttttgaagcagaatatgttacaaatctcctaatacattttagacaattagtcgaaaccattgttttaaatcccaatactgcaattgaggagcttgattatttatctgtaaaagaaaaagaacagttactgtttgattttaatgatatagtattggaatatgaccctaaagaaaccttgttgtcagggtttgataaacaggtacagcgatctcctgataccattgccctggtggcgggcggaaagaaatttacctatgaggccttagacaaaatctcaacagactttgcccattacattcgaaaacattatcaggtcacaaaaggaaacctgattggcatacagctggaccgtgacgaatggagcattatctcaatgcttggtattctaaaatcaggctgtgcttacgttccaatcgctcccgatatgccagttcatatcaaagagcacatcatttcggatacgcaattgaacctactgattactacaacttcatactcgtctgatctggatttttatactggagctattatgaaagtagataccggttttgatgccagcgattgcgaaacaacgacgattgaagtaggaacttcagatcttgcctatattatatttacttccggatcaacggggctgccaaaaggcgtgatgatcgaacaggggcagattgtaaataccatcctctctcaaattgattatttcaaattagaccaaaacagcagaggtttacaattcgctcccttttcttttgatgcttctgtatgggaaatttttatgattcttttatcaggaggaagtctctacattattggagaggagcagcgtaaagatgtcagcgtactcactcaatacataaaagaaaataaaatcactattgttaccttaccaccttcctatctggctttgatgaacattgaggatttgcagcaggtcgaacatttaattaccgcaggagaagcaccggattacgaaattatcaaaccatttttagcctatggtaactattataatgcctatggtcctacagaagcgagtatttgtggcaccatatttaaaatgcccaaaaacagccagccggattatgacagtatccctatcggaaaaccaatagcgaacgctaaaatccatatccttgacgagcatcaccaactggttcctgttggtgtagctggagaaatatgtatcggcggaacaggtgttggaagagggtatctcaatagagaagaactcacaaaaaataaatttatcaaaagtcagttccatcacaatgaaagactttacaaaacgggagatttaggaaaatggactaaagaggggagcattatttacattggacgtaatgacgagcaggtaaaaataagaggataccgtgtagaattaagtgctattgaacatcagttattgtcgcatgaaaaaatagacgaagctgttgtaatcgtacaaaatgacggtagagaaaataaagaactcgtagcttacattgtcatgactgctccggtaagcatagaagaattaagagcttttttatcaaaaattcttccggactacatgatcccgaccagttttatctttttagacaaaataccattaacgctaaacggtaaagtagacagaaaagcactcgtaaaaacagtaggggttgaattgtacagtgaagtagaatatgtggcaccaaccactgccgaagaaaagattctggttgaggtttgcgaaaaagttctcgataaaaagaacatcggtataaaagacgacttcttcagtttgggaggagaatccatcaaagcggttatgttaattgcaagcttaaagcaaaagggatttgtactaaaagtagatcatattctgagaaatcctatactcgaagatttgacaaaattaatgactttaaatacaagaaatattgaccagtcagaagttacaggtgaaattttactaacgccaattcaacattatttctttgctaattcggccattaaagaaaaacagcattacaatcaatcggttcttttaaaagcaaaagaaaccattagttcagtaagtctaataaaggcattaacacaaattgtcaaccatcatgatgccctgcgcattcattttgaaaaagaaaatgaagtctggaaacagcgcaatttaaatagtacggtctttaattttgatattgaattgtatgatttaagagatgaagacgatgcgctttctgccatgaaaataataggtgaggaaattcagtccggttttaatctgcaaaatgaaagactgataagagcagtcgtttttaaactaaaagatggagatagactggctctctttgtacatcatttaatcatcgacggggtatcatggcgcatattgttacaggatttgtcggaagcctacgcacaccatcaaagaggcgaacaatacgaattgccactaaagacagattcgtatcaatattgggctaagggcttgcatcaatatgcctccggtctaacattagaaaaagaaaggttattttgggaagagcattgttccttagacattccgcagctgcctgctgatttcgagcctgctgaggtatattaccacgaccgaaaagagacttttttactggataaagaatacaccaataaattgcagactcagatttcgaaacaatatacgatcgagattaatgagactttgattagcggtttaggtcttgcattagctgaagtttttcaggtaaaaagaacggtgctcaaaatggagggccacggcagagaagacattttacctgcaaccgatatcagtaggactattggctggtttacttctgtttttccttttgttttagaaatagcctcctcagatactatcgagaacattcttaaaattaaaaaagacctaagcagaattcctaaaaaaggcattgggtatggcattcttaattttttgaataaagaatcaaatctggaaagagaaacttgtatcgagtttaattatttgggtgattttggcagcaaagtagggacgaacgaaacctcctcttttgacttttcaaccgaatcaatcggagccccttttagtgagaaaaacggtagtgatgctaaactaagtataaacgggattatttcttccggtcaattaatgattactgtcgcatattcctctgaaacgtttaagacagcaacaattcaacgtcttgtaaaaacatatcaggcaaaactggagcaaaccattgatgatttggttagaacagaaaaagaacagaacaaaccaataaccattgacgatcaaaaagacatcacggagcaaatacaaattcaggaggattgggtggcgatatctgagaatcagagaagaattttgcaattcccacaatcgcacggaagatttgggccaatcgttatttccgatttttccaaagactcatttgaaaataagttcagagaatttttaggacttttccctttcttgaatgtgaaattcaaaaaagagagtgatggggctatttcccaaaaatacatttccaatcaggaagtgaatttagaaataaaaatcgtcgatgattataaggaaacggaaagagaaaaagcagagacagcattggaggctttttttacatcaccgtacgatctgtatgataacagctccctgattagattgtttttgatcgctgataccacagacaagacctacctttttgtaagcattcatcatgcggttaccgatatgtacaccaattcgattgtacatcaaaatctgcaaaacttttttgccggtaagccaatcgaaaataagtataaatcgaattatgaattcatagcctggcaacagcaatttctaaaatcagaaacagcctgtgaacagcgcgattactggaaagaatatctgaaaggttttgacatggtaaatcaaaatcaggttcataataattttatcgactgtgtgacacaaaagataatcgttaaaggagaaaacttccaaaaactgatacaaaaagcagataaaatgaatttgccaataacagcaatttgtattgcagcacatcaaaagttgctacatcaggtaaagaaaaatgataagcatttgcaattaaccattgtcaacggaagagaagaatttaccaaagaaattgaaatcaataaaattctgggtgtacttaataattttttacccgtgggggttttagattcttcagcttattcatctcataaagactttatccttgcggtgtatgctgattatcttcagtctcgtctttatcaaaccattccttacgaaatcattcgaaacgattacaaagaaatgacaacagttgatatagaaggagcaataggagggacatttaattatcgcgtagttgatcataaaacaatagaagattctgtttcgggagaagtaatcactacaagttacaacaagaacaatttcaatacaggtttagatcttaaatgcttgctttatgaaaatggaattcttttagatttaacataccccgtgagttataaagctgcttctgaaaaatcttttgaactggattttttccttaaatactgtttgcatcctctcttggagtaactctttttaagagcacattttcactaataattttattgaatctaagtagtttggaagtttagagatcaactgttttatccaaaaacagttgtatgctgtagacttctaaaggatagattttgtccagacttaacataataacattccaaattttaacaattaattaatttaataaacaataatatcatggaaatagaaaacgaagatcttgtatatatcaagcgtaatttagcaattgagcctttagtagacaactggtatgcctggcctcacctgatatcacctgcaactgctgcaatgaatattaaagacagacatttgaaaattatgtcatcctatgttcaaaatcctatgatccatgctgcagcagtaaaaacacctaaaatgttaggaggcccttttattgactatgatgggaaaagagttgatgaaatcaaaggactgattgataataccaaagagcagtgcgctgatcttttagcatttagagaagatgtatttgcccttaacgacatgctaaaaaaggaagctaaaggatatgctctgactgaattatacaacaaagtaccggaaagcctgcaaggacttgtagaattagtgtatgatattaataacaatccatcgttccgtttttttgaatccttattgtacgaaacggaattttacaaagaatcacttcaaagtttcaatttgtttttagtacatgatgatgattcaagatcctttgtgcttagtacgccaaaactgccgggagaggatattttacgagtaaacttaccttttaaaagtgaaaaaattgatctgttgtttgagatggaagatcatccgaaaacatttaaagaaatctcagaaatatttgagatcgaaccggaagacattcctttatttaaatctttttttacaaaagaaaaggctaaaaaatacgaacgatatacaggagatggtgtactgacaagatattttggccatgcctgtattcttacggaaaccaaaagcacaacaatattggcagatcctttagtgagttatggttatgagtcagatatatcaagatactcttatgacgatttaccagaatctatagattatgtactggtaacacacaatcatcaggatcatattctttttgaaacattattgcgactaagacgcaagatcaaaaacatcatcgttcctaaaagcaacggaggttttcttcaggatccaaatctaaaattaatgtttgaaagaattggattcaaaaacattatcgaactgggagagatggaaaccattcattttgatgattgctctataacaggattaccgtttgtaggggaacattgtgatctggatgtgagaagtaaattatgccaccacgtagcatataaagacgggttaaaagttctgtttgccgcagattcttgtaatgtatctccaaaattatacgaacgcattcataaagtaatgggcgatatagacattattttcttaggaatggaatgcgaaggagcaccactaacctggttatacggtcctttaatgcccgaaaacttagccagggataaagacgaatccagacgattggccggatgtaattttgaacaggctaaagctctcgtggatgttttcaaacctagtgaagtctttgtatatgcgatgggaatggaaccttggttaaaatacataagctccatcaaatacacagatgaatctattccaattgtagagtcaaacaaacttttagagtattgtatcgccaataatattgagccggaaagactttacggagagaaaatcgtagaatataaaagagatcttgttctgtactagacaaagggcaagaactcagggtattattgtgaaaagataatgcccaaaaaataatcattgtaaataattaataaagatatcatggtaaaatcaacattcatatatgcattagtattgttatgtatgtctacgctatacgcccagtcacagactcaaatatcaggaatactttcagcagagaatccaaacgaaaaattagcctatgcctctgtcattctgaaacaggacgcactaattgtagaaactgtcataacaaatgataaaggagaatttaagatcgaaggtgttaaatcagggaaatatactattggattccaatttgtaggctttgaggatgttgtcatgcctctaacgatagaggggacaaacaccaatatcaatatgggaaacattgctttaaaaacaaatgttacctcacttaatgaagttgttgttacagcagaaacctctcaaatctctttaaaattggataaaaaggtttttgatgttggaaaagatctaatctctaaaggagggtctgcaacacaggtattggataatgttccggcagtaagggttgatccttccggtagtgtgagtctgagaggcaatagcaacgtgcttatccttattaatggaagaaaatcaggattgacttcacttcaggggttggaacagattccggcagaatcgataaaatccgtcgaagtgattaccaatccgtcatcacgttatgatgcagcaggctctgccggtattatcaacattgttcttaaaaagaatagcaaacaggatttgagcggcagtatgacagtggtgggaggaattcccaatgagaacagactaatgggaggtattaattataaaaaaggaaaatttaatctgttttccaattttggaattcgttactcagattatgttggacttaataccagagatcaggtcactacagcaaacggaaatgcagtttatttaaatcagcgtgaagatcagaagagacatgattctggagggctgctttacatggggttggattattttataaatgacaacaacagtatcacctctgcattttatcgcaatgatacaaaagaccgtgataagaatacgctggattataacatctcgggagaaaattcacagaatcagcagattcaaactataggagactccagagaaaacagaagttataatcaattggagttcaattataccaaaacgttcaagaaaccggacagaaaatttacagtagacttccagtatgatttttgggacagtacaaaagattttaatatcgaaagaagtacccttgttcctaatacaggagacaaatctgttataaacacaaaatcaaaacgcgcaagtgatgatgttgtgatacagtcagattatgtaactcccttaagtgagaccgctaattttgaagtaggagctaagcttgaaaacagagtagtatctacaggatttgccgcagatgaaaacaacaacggaacggttacaccaatagaaggattcaataatggtctggactataaagaacagattgtgggagcatatgcacagtatggcaataagataaacaaattcagctttttattgggactaagaacagagtacacttatattcagattaaaaaccagaataccggaggaattttaagagacagtacctatacaagattatttccatctgcaaatctaagttatgctctgaccaaaaaaacaacggctcagttaaattacagtcagagaatcaacagacccaacctggatcagttaaacccttttccggaacttttagattttaattctcgtattttcggaaacattaaccttttgccttctttgaccaatggtgtagaattaggaattttaagcaaagtaaaaggattagtgctgaacccttcaatttattattcaagaactaaaaatgcgtttcaatacttcacctcacaaaatgacgaaggcgtttttgaaaccgttttaattaatctggacagtgaaacccgatatgggatcgaaatttcggctcagtatgctcctttgaaatggttgtctcttaatgcagagattaatgcttatggttttactaaagaaggaagtgcagacaatgttaatctggacatttcaaacgagacctggaaagcaaccttattaactcagattaagttaccaaaaaactttacatttcaaagtaagttagattatcaggctgctgttagtgatgctcagaccagaacgaaatcttattattacctgaatgttgcttttggaaaatcattgtttaaaaataatgggtcattatcgttggcggcaagtaatattttcaatacccgaaaaataagagagaccacggtaggttcagactttgtagtgcatgaaatgaccaactttaatgcagcccgatggactctaagttttaattataaattcaataaggggaaaaacaggaaagaacatcaaagtaacaggaattaaaaaatatgttggattaaaagaaaaaagctatgtatctcaaccaaaaaacgcaactatttttgctgcattttgcagggggaagctgttactcttttgattttctaaaaaatgatattcagaataatttcgaatgtcatgctttagaacttcccggaagaggcagaagaaatcaggagtcgcatctttttaagaaagaagacgcggttcatgattatgtttcccaaataaaaagactcagaaaaagcaatctgccctacctgatttatggtcatagtatgggagccactttagggctttccgtaacaaaaaaaatggaagaagaggcagattcacctaccatgttattggtttccggtaatgccggccccggtgtttatgttaatgatattgaaagacacaccctaaacgataccgagtttaaaaaagaattgaggtctttaggaggtgttccggaacaaatattggaagacgaagatctctacaattatttcagtccaatcatgagagctgattttcaaattctggaaaaggacaaacattttgaagcaggtcttattttgaatacgcccatttttgcgatcatgggcgatgaggaaaaaacagtttcggaaattgaaaactggaaaacttatacaaacagacaatttgactacaaagtagttccaggcaaccatttctttattcacagacaagtaaaaacactcgcaaaaattattaaggaatgtgctgcagattcgttagtaggggtataaaattaaaagctgaggttgcatcggctcttcttaccgctataacacagtcgtctgatgacaagttcgctaaagcgttattttcccactaaaatagcataaagtaaatagacatcccctgcgtcgtggggttggggatcatttataatttttaaaaaaaagacatgaaaaataatgtatcagagaacagcaattctcaattgatccctttaaaacccttaataggatattctttgctggctataatttcgggattgtcaggatttgcatttataacgattattaataaaattataagtaactctattactgctacagaaacacagccaatgcaaaactatctctatatgtttgcaggtacaattgttatcttttttgtttcccgaagatggctggctggtggtgtaattaagctgtctcagaaaatatactgggacattagaaaagacgtaataaagcttattcttaaagccccctacagaaaacttcaggaatataaagaagaagtttatgccacactaactacagatgtaaaccatgtttcaaatgcatcgctgatggttattacttttttttcttcgatcattcttatagcggcttgcttggtgtatatggcctttttatcgttaaaactgttaggagtcagcactgttgttatagcacttggagtactcatatatgcactccgatcaaagtccagtaataagcaaataaaagaagtacgagaactagaaaaaacattcattacaatttttaatagtattcttaacggggcaaaagaaatcaatattaatgccgacaaaggaactcagatttatgatcagagattaatgaaagttgctacaaccggagaaactaaatatgtaaccgctctcctgaaatatcttaatagtgagattataagtcagatattgttctatgggcttattacatttatcctggtattttcggggactgtatttcaaactccaatagcgactaaagtgagttttacttttgttttattatatctgatggggcccatcgtaagtgttatgacaatcattccggtgatgaatagggcgacagtgtcacttaaaaaaatgaacaaactaaaagaagatcttgccaaaattgaaaaaccgcagaacgttagtcacaaaggacaatacaaagatttttcagatttaaaaatacgcaactatgcattttcctttggcgaaaatcaattttctgtggggccaataaattttgacattaaaagaaatgaagttgtttttatatatggaggtaacggagaaggaaaaacgaccttcatcaatacgattctaaacctttacaatttggataatggagaagcatatatcgatggaaaattagtaccgttaaaagaattggaaaagataaaaaatctattcgctcccgtttttagtgacttttatctcttcgatgccttttacggaatagcagatgttgattatgataaagtaaataaatacctgaaattatttgagttagaaggaaaagtacaaataaaagacgggtatttttcaacaacaaacctgtctacaggacagcgaaaaagaatggcactaatcaatgttttattagaagacaggcctattattgtactcgacgaatgggcagcagatcaggatccgtatttcagacataaattttacaccgaaattatcgcgaccatagttcgggatgaagataaaacaatcattgccatcacacacgacgaccgatattacaatactgcggataccttgctgaaaatggaatatggtaaattagaaaaaacaaacatttctgaacttgccgaaatcttttaggacggtttagaatttccggatactttttattagcctcgtacagacttctttttacttcccggtaaaaagaaagggactttatgtgctttataaaatcgaagaattagaatagaaaactacttaaccttataaaatttattatttaaagatataatctcaagaaaatgaaaagaagtaaaataattaaaacagcactttttgtggtattgtccctgggctggatatttatcacaacctttaatttaggaccatttggttccctgggaaaattaacaacctataaaacaggcttgttgtctgtgcctttacaaagcgatggaacgcaaaaaattcacagcgatcaaaaattagatatttttgtagataatgttggaattccccacatctatagtggtaccaaaagtgcagcagcttacggactgggatacatgcatgcaaaagacaggtacttccagatggagatgatctcaaggattgttcagggaagactatcagaatttgtaccgttaggaaccctaaaatcagataaattctggaaaccgtatgagtttgaaagaaaatcagaagagatactggcgagctataaaaaagataacccggaattttatgcttatctgcaggcttattctgatggggtaaatgcttacttaaacaataacgaaaatacagatcccttatataaagcattaggaacaacacccagaaaatggaaaacggaatattcgctgttattcacctggtatatgagctatacgctgacttattttgatcatcatatcgaccaacaggaaattttagagaagctgccgggacaggagattacttatttttaccctttacagccgaaaggaataaataccattttgccttccggtttactaccttccactgttaacctgcctaacataggagctcatactttggggacagcttcagtagataacattccagaagaatcatcattatttgatttaggagctaaattaatgaccaatcataagttctatcaaggtgtaggaagtaacaactgggtggtaaacaacaccaaaacaaaaagtaaaaataatattctggcaaatgacccgcacctgtatttgacacttccggaagctttttatgaagctcacattgtaaccggaagttttaaaacatacggttttacgattcctggtgttccagtgatagtaagcggtcataatgataaaatttcatggggaattaccaatggagaatgggatctggtagacagatacaaacttcaggtaaaaaatgacagtctgtacctatatgaagggaaatggattcctttccaagttaaaaattataccattaaagtaaaaggaaaacctgactacatagaaaagtacagaagtacggtacaaggaaaagttataaaagaagaaaatggacagtattacgcacagcattggtacgctgctgaaaaaagtaactctgtaaaagcaatgtacgaagtgatgaagagtcagaattgggatggtttttcaacagcattaaaagattatagctatcctcctcaaaattttgcttacagcgatgtaaacaataatattgggattgtgtgtgcgggtgaattgccggcaagaagcagcgattatattggtcaggtattagacggtagcaaaaagtatgttcctgtaaaagctttagatgctttttggtcggcttataatccggataaaggatttttgttttctgccaatcaacagcctattcagaacaatgtttactttggagcacatggttcaaaagacgattacagagccaaacgtatttattctgtattagaagaaaagcaagactggtcagttccggaaattcagaaaatgcaaagtgatgttgttgatatttcccttaaagattttaaaacattaataaacaactatccgcaaaaagaaaaatacaatagcattgtaaaagaactaaaaaactgggacggaaacatgaacggtgacggaaatcagggattggtttttgaaatgttgcgaaaagtctctataaaagaagcgaagcaatttgcaaagaccaaactgcaggtaaaacaagaaccatcgttacaaaacttcttaaaatacctgaatgataaaaagtatacccttccgggtggtgataacaaacaaaaagtggtagatgctatttttgaaaaaacactggatactttgacacaaacttacggcgatcaatggaaaaaagtgagctacaaaaagatgtctaagtttaatatcaacaatatgcttttcattccgggactgggagaaaaaattgacaatgcgggaggtaatatcaacaccatcaacatcaatacagaaaagtttcatccagtcttccgtgcggtatatgaagtaaaagacggaagcatacaggcacataccattttggctggaggtcagagcggtttgataaattcagcacattataaagatcaaatagaatcctggagtaaaggccagtacaagaaaagccaatttgttaataatcctgctaaacttaaaaaaattgtaaccacgataaaatttaactaatgaaaaatatactaaattacctgccctttatagttgtattactagcacaatttttaataaacaactataccgtaatattgctctttaccattttaacaggctttattgctgcttttaaaatagagcgaaaaagagttttcttaaagtgttttataattgggttggtggtagcaactaccgtattccttatctatgaatcgagagtggcatatgtaaaagatcttctggtaaatcttggactatcaagtctttttatttatgtttttttcccgttgtttaatgctttaaacactgcaattcttttcttttttggttataaaacgggtacgttggttttagaaagaagacttgcgagaaccagccagatatagacctacaaagaaacttgtctgaagaggatcaaaaaaacgtacagtcaaagcaatcctcttaatcttaaaaaaacactatcaatttctaaacacaaaaaagatgaaagatcgtaagtcaaaatgcagctgtgctaaaagcggagtaatgtgtgcacttaaattaagtttaatcaaacaaggagtatcggcatcagacagtgcgataaaaaataaggccatttgtcctctaaaggcggcagtgttgagtaatgcttcgtaagcggtaatagaagtcccgaagaatgtaattcaaagtgaataaatcagctataagaggtcttctatagatttatgaatagcctgattgaaataagatccgtaaatattccccgaggatatgaaacagtcgaaaaaatagtgtcattgttatacataatgacatcaataataagtactgagaaaattattcaatcatacctaattgtattattgaaatcaaaaaaatataaaatattggtaaagtctaatgcaaaatatataatgaaaaactcattgtacattttttatatacgttaatagtattatgcaaaattcgacacattacttagcctttcgtgattttgaatctatccctaaaattgatttgaaagaagatgaatactacctatttcagcattcaggtgattgcaatcctgatcaaagtattctggattattatttggaatttttacctcagaaatttagacaggaagtacttaaatatagaaaatgggatgacagatacaactgtttgtttggaaaactaatggtgcgtatgggatctcatatattaggaaatcactcgtttgaattcgagaaaatggttaaagacaattatggaaaaccctacatgttaggcagtaactttaattttaatatctcgcatagtggaaatatggtagtatgtgtctttagcaaacaggaaataggtgttgacattgaagagatcaacgacatcgattattcgttgtttgaaaatgttttttctgctcaggaatttgcagaaatcaatcgtgacggattggataaattttacgaattctggactagaaaagaatctgtcattaaagcgataggaaaggggatgtccattccgcttacagaaatcgaaatcaatacaggctacacaacctatgaaaatgatacctggtacactaaaagttttaaaattgataacaaatattgctcgattaccacaaagtacgatcagataaaagctcaggaaatgcaggttatattttaatagtctgtaaataacatctgtttgctgttgtgatcagccttgcttcataattgtacctatggagcattataagaaatcagatttaacttttaaacgaatacttaattcaacgaaacctccgggatcttatggttcgggaggtttttttatgtgcagtaacgacttttggatgcaatttgttttattcggaagcgattacagcaacaataattgtttagaacagaaaaagagttttcaaaaacattcaaaagacataatattcaaaaaatagtgtctcttttaaattgtcggtttttactgcaattgtaatttttcttcacaaaaaaactttatcttggcagagaaaatagaggctgtttcttctgtaaatccggctgataaccgagcctaaagggatgcattagaagcagagattacaaaacaataaaccgtaccaaaaaacagataagaatgttatcatcacatgaattgttattcttttttagtgccttaggggcttttaatggtttcctgctttctttatattttgcggtaaatgccaaaaagaaaatttttgcaaactattttttatccttgctgttactggtattaagcatcagaattataaaatcggttttcttttattttaatcctcacttatcgaatacttttattcaaatcggactttcggcctgcattcttattggcccttttctttttttatatctcagatcttacagtccctattccaaatcagtttggattacacatacaataccttatttggtgatcatggcaattctgggaagtctttattcttatgtcgagcatcctcaaatctggcgtgtgtggattgtaaaagccatatatcttcaatggttggtttatatcggtttctcttttaaatatattcagccaattcttcagaaaatcaaagagaaggagagcttaaaaaagttagaagtatggtttcttaacatctattttggagttgcattggtatggactgcctatacttttgcagcctatacttcttatattgtcggagcattatcgtttacctttattttatacctgatcattttacttttaatttacggaaatagccaggaaactacattctttcaggaaaaagagagatacaaaaacaaaagcattgataaagagacattagatctaatgagtcaaaaattttctgttatagtagaaaaagaactttttctgaattccaatttcactttggaagaagcggcaaaagaattaaaagtaagcaaacatattttatcccaatatgtaaatgaagtagtaggcaaatccttctccaatcttattaaagaatacagaatagagaaagcgaaagagctattagaaaccgaaaaaaactataccattgaaagtttgggttatgatagtggcttcaattctaaatcaacttttttcaccgcctttaagaaacaaaccggattaacccctaccgaatatcaaaaacggtactccaaatgagttctaatttatagaatgagacttcagttttataatctaaaccctgtaaactaagacgataccggacatttgtattcattattaataacctaaaaaaattaaaaatgaaaaaagtgtttttgtttatcggattaagtctgttgttttttaaatcaaatgcccaaagtcaaaatactactgatgactggagtttgattcaaaaaacactaaatctctacatagatggtcaggctactggcgactctgttaaagtaggtcaggcatttcacagttcctggcagctgaaaggtttcagagaaaaagaattcgtagtcgttcccaaatcgaagtatctggtaggatacaaaaaacgagatgttaaacctgataattggtcaggccgcatcgtttctattgatttcaccaataatgcagcaagtgccaaagtagagatcagcactgcaaaactattatttgtagactatttcaatcttctgaaaacagatcagggctggtttattgtagataaaatttcaacccgtactcctcacaaaatcgttgatgcggaagtaaaaccaaaaggatagtccagtactttttgttcaaactaaaaccgataatctccaaagaaatgttaaaaataatcgttttatcactagtttttacagggctgtatcctcaaagtactcacgcacaaaaaaatatattgtttgtcacctcaaatcaggatttttatggcaataccaaaataagtacatccaatcactttgaagaaatagtaattccgtacgacatatttacaaaggcaggctacaaggtagattttataagtccgaagggtggagcaattcctattggatacattaatgcttccgacagtatccaaaaaacatacttatacaacagttggtttatgagcaaattgaaacagaccagaaaacctgaagaagttgcggctaatgattattctgcaatattctatacaggcggaggtgccgcgatgtttggggtagccgagaaccaggtcattcagaaattagcaggagcaatctataaaaaaaatggaattatctccacgatttgccacggaacagcaggaattgcttatttgaaaaacgagaatggagtttcactctatgcgggacgaaaaatcaccggttttccggatgaatttgaaagtaaagagatggcctattacaaaacatttcccttttcgatgaataaagcaatcattgacaataaaggtaattttgtttattcagaaaaaggaagagacgctttttatataacagatggcaggtttgtaacggggcaggatcctacttcaggcacaaaagtagcaaatgaggttctaagattaattagggaaaacgataaagaggcaggaaataatactgtaaaaagcgactttgatcaaatcaccgaagttctgttagattatatggaaggtacggcagaaggacagcccgaaagactgagaaaagccttccatcccaattttaacttatatacagtagccaatgatacattgtggacacgttccggtaaacaatatatcgctaacataaaaacaggggaaaaattaaaccgaatcggacgtattcttgccattgatatggagaaagatgccgcaattgcgaaagtagaaattaaagtacccaattggcgcacttttacagattactttctaattcttaaatacgaaggaaactggaaaataatacacaaaagctacagttggacagctattcctaaaaaagaataaaccataaaaaaacatccgctaaccgcagtttgatcaaatacggtaatccaataaaaagtcaggattttttcgattaaatatattggggtaaattaaaaagtgaaatatcctgaaaaccgttatttgggcaaactgcaactagtgggagtattacgtaataacaaagatgaggtctccgaaaatggttcaaaaattaattaaaaacaatcagatcctatgataaacaaatttttattgaccctaattataggttcattttgggtaataaatataaaggcacaagtcaaaagcgaccaaaaaaatgatgcctgtatagtaggaattaaaaagcagtagaatattccgggcttggctttggccgtaataaagaatggagtgctgattcacaaaaaaaatatgggctagcaaatattacaaatgttaccgctccataactttgatacttttatcgtttagggatttattttgctctagttgagaagttttttttggaaaagcaatgtaatccttccattttggatggatgatcgtatcattttgataggtattggtaaattgagaaagatgtttttttgttttagttgtttgttagtcagtgttttattctttttgaaaatggtttggcatatcaattgtttctaaaatgttaatcggaataccgatacgaacaggtgtaaaacaatataaactagagcaaccatgaatgaagataaaacaagaaagaaaaaaataaagaaattaggtatatcaaataaagcgattcggcaaaaagacagagttatcaatttaatggtatttactacgattttttttattgcacttttaatgatttcacaaatagtataggtgcgattgaatatggacatagaaagagtaaaattttcagtaatcgagagttttactttttttgtttttaaatagaatgcagctcaaaaagatctttacagttgtggcctcaaaatgatatgtttttatcattttgagacgttttttttaagcacaaaaagtactttttagatataatatgcaagaatataaggttttaatagcaatggaaagactataaaaaatattggtatataagttggatgtagtggttaacattttcatcctattgaggaataaagatagtaacaaataaaatccaaacgaaacgattatgagaaccataacctacaaaatagaacctattgaaagacattttacgttttcgacccttttaaaaaaacaacaagcatcttcacaccttaaagaagctgtagaaattcccgattttagtattgaaaaagccagacctgttcataccttttggataaagcagatttgtgaggtaacactttcgtctgctatagctcgcggaaccggtatttcaggacgttctcctgagtttcttgaaactaaaatgaaaaaaggagaggcagtcatagccttcgcctcagacggaaggtgggcaggtttttcttttatctcttcctgggaaaatggagagtatgtttctaattccggattaatcgtcgctcctgaattcaggcacaccggacttgctaaaagaattaaaacaaaaattttcgaactcagccgtgagaaataccccaatgcccgtatattcagtctgagcacaggtcttgcggtcatgaaaatgaaccatgaactcggttttgaacccgttacttactcagaactgactacagatgaaatgttttgggaaaattgtaaatcctgtgtgaactgcccaatactgataaacaaggaaaggaaaaattgtttgtgtacagcaatgctttatgatccgaaacagaatacgacgatcgtagattaagtaaaattttgaggttgtgttttgatgcccctagtatcaaacaatacaataaaacactttggaaataaaacaacaaaaccctcaacattgttgagagttttgtcttctgtggagaaagagggattcgaacctaagctccgcattccgtttttatactgcattttttatatttttttctgctgtgccacgaatgcgccacaaatttcaaactatgaatcttaagttgtaactatttgcttgttagtcgtttataattcttaattaattgtatgtcaaaaatacaaatttttatgacatcactaacaaaacattttttagcgccacattctaacctataccttttgtcgcttgattttaaagttgctttgttttgcaaaatagcctgtgccatgattttgccagaaaactaattatattggcaattcagttaacgaccagtttgactgtcttaactttctgttgcaaaaaacattgctgctaaaaaaaaagctgactcatttctgagacagcttctttgttttattcttaaactaattttctcctgtaagagtctttattgaacctaattttaaagtttttgctacaaaatagccactatcagatgtagcaggtttattagtgtatttttcggtaagtgcagctgtattaagttttgcaatactacctccaagtgtagatccagcaagagcgcctccaatggttattaaattattaaggttgatagaatgaagactaattagcctctttgtactgaattctgaggtactggaataatttttggcatcagctgatatataataatttccgctggctgaaatttttgcctcattgaataatctcgtcgtaagcgagcaataattaacattgtcgacaaaatcgacctgataaccttttcttattaaattttcggcatacataaaagtttgagtttttacattcggttctgttgcaaaattaggcacacgataatcaagtacatcctctaaaacaacttctagtaaatgtgtcacagtcactgaggttgaaaaaaaggcaaggtatttcgcggaagctaccgtttcttttgtaaccatgctttgaaaaattattctattattataaacaggttcatattttttcaactgctcggtagataatatttgaaaatactcaaattcatcttttttcccgggcttataatatataagagctcctataagttgttccggtttaacgtttgtatcaaacgtaaccatgcttgctgtcttaaaaacatcttcagctttttgagtttgagcaaaagaactgaacgctgtaccaacagtgagaagtaaggtaattaactgtttcataattagttattttttaaattggattgaaaaataattgaaattagatctttataaactaaaactattaagtataaatacctgtttttaaattaaaaacttcggaacaagagaattaaaaaagaaaacaaaatacagtttataacctcaacttgttaggtgtttattttgctgaaattttaattcttcaaagtgccttgtgcctcgattacgccacaaaactttggactggggaatatcgttaaaaacgcttcaagtttatgtggcaaaaaggtttccatttcattgtaggagtgattatgatgagcaaataaaagaaggtgtaaagtaagaaatatttacaccttttttactagaaggtctttgcggaactattacagggtatgcttagaaactcttttattgctctgttttttttataatacttctacaaatgtttaaaaatagcttctattttagcaacataatcttcagcatcactctttgaaatgattgagctgtaagtatgcccagcattatttctcatatctaatatgtttcgacagtttgtaaataatgcttctgccgcaacataatttgcaaaaatagttttgagataatctgcaaattccattattaaaggaacagagctgtaactggcaggtagacctccgacgggagaaatttcgtaaagcaattcaaggatttgagtcagttctcccaactttttatgggcagcgggattgactgtaaaagtttttaaatgatataaattaatttttcgttcattagcagttcccggatgaaaaacaatcgtacctgagcttggaacgacaatgcctaaagttctcaaaacaccaagtaatttaatattataattagcatctgctgtccatgaggctttatctacaggagtaattaaagttgcaaaatcagttacccattttatcagctcaaattcaaaagcccggccgtattgaattacaacaggagcgaaatcagcaccattatctaaatttttcagcagatatttacctgttgctaaataatgaagcgttttcgtgcggtcaattttagttatatctataattgttccgatatcagctaggtagttcaaataatctgttttagatgtaaattcatcaataaaatccatctgttcctgaaggagggtctgtagctctaattctttattttccttatccagcttaatttgtgcaagctgctcctccagtgtagtttttccttcacctgcgtttattagttcttgattgagctgctctatttgatcatcatagtttttaatgttttgagcagatgctatcagtttggcttttattacttcataatcatcgacaaaatgatttctctgaatatttagtaggctaagtttaagattggtctgctcatcaaaaaagccttctccaaaatatttttggtaatcaatactgccgtctttttctatttctacagcattgatatatttttctttcaatccatctctaacatcattggggtcattgaagtaatacattttaacatcactcagcttcactatattttgacctatatattcctgaaatttatagataaggtattcgctatgggtttcaataaggaactgaatattgaaccttgaggctgcatcaataaataactccgccatttttgactgcagggagggatgcaggttcgcttcaggttcttcgatcagcaaagtggagggactaaaataaaaagcatggctatgatactctccatcttcaggattaagattatattcgtgattcatttcttgcttttgggcaattatagcaatttgcataatgattggaagcaattgtgatattccataccccaaatcggccagagatgtttttgttccatcaaaattgaccagaaaaactttagtcagtccaatgtcttcatctctaaaaacgaaaagttttttcccaattttaaaacctttctgtttcttttttccattctggtcaacctcttcaatctctccttttccaatccagaagtttacaaaattttcaatttgcgggttaccttccaaatagattgtcgagaaatcttttataatctgaatttcttcaccattctgttcgtcaataaaccattccctgtttttgcctcttgaggtgggcagaaaataaaccttttttaaactatcaatttttttctgggcagcatcaaaaaaatctgaatctattgcgctcaatagacttttaagaagttcgctgttaggggttgtttgatacataggctgtataaaaggacgcaaacccttttcttcggcactttcttgctcgtgccagactctttctttttcaagttcagcatttgcaacttttatttcaattccctcttcaaaacctgaaaatgaagtattgaaacagtctaaaactttgtgctgataatagtttcttcctttaagaagttcagtaaaagtattttgttgaatagacagcagctgagctttttcttcttctgttaattctgaataatcagagaataagctttttcctttgacgagtttttctgtaaaactgtcataaccgtcttttttctttctaaagaaaggcaggtcaaaagaagtgtgtttataaatttcgattctactaaaaaggtcaatagtagaatatttttctgtgttttcagttggtacaaatccttcaatagtctcttcaagaggtgtttctagaattagctctatgattcttttcagattgatgcttgttgacatttcccaatagataccttcatcgcgatcatagatgcgaccgaatatatttgaccaatgcagatattctccatcctttacaatggcgatacttttaatatcatgagaaataaccacatcttttgtagtcccatttatagtttgtctcaactcatatctgatttccaaagtagcgtgtatttccctgctaaatccaaattttataggaaatgcaaacactaaatcttcatcgtcctcaaaaattggcaggtcgcttgaggtcatatttccttttttatgaaaatccataagccgcgaatacatatgctgttttttttcgactcctgagcttttaaaggcctcaaatgtcagacggttaaagatacgttcaagatttccaagttcatgtttcatattcttaaagtctaaggtttcagaaacaattccttctttaaaattatcaaccatgaattgaattgctttgaaaacggagcttttccctgcgttgtttaccccagtaagtaatgtaattggtgcaaattccaattcttccttgtttttaaaagttctaaaattttgcagacctaatccttctaagtttggcattatgctttttttgtttaatattcttaattaattgctttgtttacagcgcctagctgacatgaatttgaaagtttattttaaacacaaaactgtcgttcattttgttaatttcatatgtgcattatctattctgctttcaattttttatctcagattgaatttcttacatgtagtcttcagtaaattctgtaatggctgatatctgaccttcataagtatttctgatgcttccgccttttaatactttttcctgatgaactagagcatttatactgatatatattgaaaatccaacatcaggtttttccatgtactcttttttattctcgttccttacaataaagttatttgtataaagatgtgaacccttctctttaactgccttactatacgcagatattgactgtccgccagtttgagtagtagaaatgaatttttccagatagtatattgtccagtccagttccccgataaattgatttatgtaaaaacccataaaaattggttttttaattgtattgtagtacctgatcttaaaagcgttttccaatatatccagaaaaaccggatcaaaatcctctgttacatcattttggactttggagagcagattttttagtaacctgaatttgtccaggtgataatgatatttttctttctgctggagattataaacaattaccgctttcaaatatttctctacggcggtgctggcaagagtgagtccctgcactataaaatggtttttaagcaaaaaacgggcagctatataatcacggtagccaagatccataagcgaagatccagcaaacagcttttccatgtatgtaattgatttgtccatcgtataaaagtatttactaattaatcgttcaaaggttcttaagaagtacgcagttattttgcgtaataaattaatacagccaattttctgctagtgttagagcaaaaagaaatacttaagttgtatcagattgattcgatacagtgctcttatagattcccgtatatgagttttgttttttttatatacagtaaattatacgcttttgcatataaatagaaaatttacttttttattattaagaaattatgaatgtgccggtcattaatttttgttctaaccttgagattccaatttttgtcatattcaaagctgaagatttcttgcttaaggcaaaatttgccaacggtatgccttctaactcaggtttctgcatacccatccaatgtgcgtaagcatatatcaaatttgttctgtgccatctcttctaattataacaactctaaatcttgtaattttcgtccaaaagtatcatcagctgcaagtttaagaaaatcttcctgaagacctaagacacgaagcacattaaaataagcacctatagctacgccttcatttcctttttctataaggtataaagtagatcttgcaatatctgcacgttcagctaattgagtagttgtaagtttacgtctttttcttgctagtttaatattttcacccatttgttccatcaccttcttatatttaggataaatgatttgcttcttcctgttcatgttttcaatgtattattaatatcactcctgttgctgatgaatgttatttcatgcaaaattggcttatttgtttgaaataacattcaatttatcctttatctttttttgttgttcttgttcgggataccaaatctcatcagaaatgatcatctcagttagcattattcttttttgaacttatataattttaggataaatacttaaaaattagagaaccaaaagagcgaactgtgacaaatgatacatataatttcgtattcgaaaactattttagcaatattaaaatcagatcggttttaaaaagctaaccactaaggtttttttgattttagaacaaggcatcaatcaagtaagcaattcgaaattctaacttattttaatgaaaaaagctaagacatataaggttgtcgataatttttttaaactcgatcagagattaaagaagatagaaaacttattgcttttaaatgaatctcagaataatctatcatcgtctgaaagatgcaaaagctcttatagtaaaagtgagcttgcaattcttttctatatcctgatggatgaaggtctgttattttttgattcggctgatataaaaaaaaatcgaatcaattttcaggaattcataagtgaaaattttacatatagagataatgaaggagttcagaaaaggataactagaataagcagacagttttctgagtgtaaaggttatacttataaagaaaaacagatgaaatttttagatgacttgattagtatattgattgagcggaaaagaaaacttgagaactggtaagctggggatgaaaaaaattataacattaacaaacaattcaattatgacaaagaaagaaaagagacagttttttataatggagattaaaaacaatatagatcctttaatgttaaaactggaagtgatcgattcaaaaatcagtaaagggaaaaccttgagacctgcttattacagaaatgaggatttaaaaaagatatttggattatctaataatactattatgaaatacaggcagactgggattcttccgtatacaaaattgggagatatatttctatacgacagtgtaaagattgaagaaattcttcattaaaataatgtctgaatggggctttttaataaatattaactatttgacaattgattttattaaattaaactcaaagatcaaacttgtaaaaccctaaatactatgcgtacatattattttaaagcaaaaaaatgaggatttaataaaaatacaccaaggataaaaaaaatatgacaattaaaaaggcaagcccaaatatctccaaagatttaacaaatgctatttcacaatccctctttcaaatcagttacaaattcctatgtagtctgtacaagcaatcaaagcttcttgctttttcaaaaaccgattgaacagcggtaattgcatacgacgatatcatccctcataactagaatcaccgaaaaaataaaatcgcaaatattcaggcgcactaaaaaactatctctattcaggaacaaaatgcctatctgccaaacatcaataaaaataacaaattttcctacaaatatataaattaatacttcaaaacctacaaatttaaattttaaaataattgccggtagaaaaaaacaatccaatcgcctctcaacaatatcttaaacaaaccaaatcaataagaaaaacagaactacaagaatttataccagaaaaaaaataacaaaaaaaaatgcgaagcctgagcctcgcatttctaaatatttaaataaatatttctattctactgtaactgattttgccaggttacgtggctgatcaacattacaacctctcattactgcgatgtaatacgaaagcaattgtaaaggtatggttgtgatcagtggagacaatgcatctgaagtctcagggatctcaatcacataatccgctaattcgcgaacttgtgtatcccctttagtaactaccgcgatgattttaccactacgcgatttgatctcctgaatgttacttacaattttatcgtaatgtccttgtttaggtgcaataacgataaccggcatgtgctcgtcaatcaaagcaattggcccgtgtttcatttcggcagcaggataaccttcggcatggatataagagatttctttaagttttaaagctccttccagcgctaccgggaaattataaccacgtcctaagtacaaacaatttggcgcatctttaaatgctgctgcaatttcttttgctcggtcgttagtttctaacgcctctgctactttttcaggaataatctctaattcctgtaagtaggtatgaaaatccgtattagacaacgttccttttgctttacctaatcgcaatgcgatcatggttaaaaccgtaatttgagttgtaaaggctttagtcgatgctactccaatttctggtcctgcatgcgtataagcacctgcatgactttctcttgaaatagaagaacctacgacattacaaacaccaaaaacaaatgctccattttctttcgccaacttaatagccgccatagtatcagctgtttctcccgattgagaaatcgcaattaccacatcgtctttattgatgattggattacggtatctgaactctgatgcatattctacttcaacaggaatacgggtgaattcttcaaagatgtactcagctactaaaccagcatgccatgaagtaccacaagcaacgattaaaatacgtttagcatttaagaatttctctaaattatcttcaacacctgccatctgaacgattccttcattggcatgaagtcttcctctgtacgtgtcttttataacacttggctgctcgtagatttcttttagcatgaaatgatcgtaccctcctttttcaatttgctccaaattcatttgaagctgttgaatgtaagggtctactaatgaatcatctttgatttttctcactttaagaggcttatgcaatctaatgtttgccatttcaccatcttcaagatagatcgcatttgaagtgtactcaataaaaggcgaagcatcagaggcaataaaatactctccttctccaacaccaattgccaatgggctacccaatctggcagctacaatttcatttgggttctttttatcaaaaacagcaattgcgtaagctcctactacctgatttaaagctatctgaactgctttacccaatttcaaaccttcatttttctgaacttcttcaattaagttcactaaaacttcggtatctgtatctgatttaaaagtataacctctcttttttaattcttcttttagcggtgcataattctcaataattccattatgaattataaccaactctcctgaattagagagatgtgggtgtgagtttacatcatttggaactccgtgagttgcccaacgtgtatgtccaattcctatgcttccggttgcgtctaagttctctttggctttaacctcaagatccgaaaccttcccttttgttttacaaagttttatccctgattcagtgttatacaacataacaccggcactgtcatatcctctgtactcgagccgctttaatcctttgattacaataggataagcctctcgatgaccgatatatccaacaattccacacatatattaattattaatttggtttcgtgtagtaaacttcaagctgtaatttcttcccttttggaatagttgcacttgaagtgcctccaaataataccgtccctaatggactaataactgaggctctaggtgcctctgagataacgttgttttttagttttaatttgttagaagctattgtgcttgcatcacccgtcaccaccaaacctaactttacgtttttcacagttgcattcttaatcatattacgaatatgattggttaatctaattttataggtagtacctcttttggttgtaggatctacattaataatcccactatatattgccttattcaataacggattagatgaagaagttgcatcagaaacgtaatctacaataggcacattatcatccaggttgtacaaataaattcgtttaggctcataaatcccagtcattttatctgtatcaatagaaaaaactaaattagcctcattcactaaccacttattggttctgatttgatctaattttgctccaaaaccattcaattctaataccgctaaagatccctgacctccttttaaataaagtctgtcgtctccagccttattatttggatttgctatcgcactggcataagcagggtcttttgcttctttaagcaaacttgccgaagcacctgttagcttaataactaaggtcttatcctccattgtagtgtctgggtctgttgttatagccgtcttagccttgtacttgatcgttattttaccatttgttgcaaaattcagcaaagccatattaaccggactactacctgaacgctctactttaaaatataatcctctaaaatactcctgaaaaacatcggcagaagccaattttgcagccggagccttaagaattttatccatgaagaaggttttattcaggttcaaacgcatttcaggggcaactttagtacttgtttctttacccgttgtgggatctgtacttacatctgtgatctcactcgcattaaagaaaaattcatcattttgtgctatgttaggatcgtcatttaaagcctttccagtagcaacatatggttttttagatttatcaaaattaatgtaactatccacacctgtatctgtatccatatctgtattatacaactgtgcaaattgagcacctccatcaaaataagaactacgcatctgaacccctgactcataaacccctaatttaattttaccattagaggctccgtagatagaatccagtacaaaagttctgcttccgtcactgtttgccgtttttacatgattaaaataaggaacacttagcaccacacttacgatttctggtgcatcaccaatagtaggtgcatacgtatccaaaccaacctgagtcacaaaactggcagcggaactaccaaaaactgcattatcataaatacctaaaccataatttaccgatccgtttgactggattggggttacttcctgattataagctaaaacttcatatttttcagattccagaccaaaatgatcgtctccgatcaaaccatcaccaatcgcattaaaatctttatcgcaagaatataaaaggacaactgttgcaactaatagtattttcttaacaaaagaagtattgtacatgtgtaataataaagtttaaatttagagacccattgttttatagaaatttgtatacgcttcagcgaatgcatctttcgtggcgaaaggtaaaaaaggttttcctgaagattctataaattttgttaaacttggcgatacatgctcagaagcaataattacggcatcagaatgcaatatactggcttttaagatattttcgtagttaggcgtttccagatcagcaactgattcatgcggaaccccgtcaaattttactttattaatcatttctaaatccagattttcatcaaaagattgtccgtaaaccgaagttacgatcttagtttcagaaaataaagcttcatttttataatagtgcttcatgtaaataggcaacatcgaagccaaccaaccgtgaacatggataatatccggaacccagtttagtttttttacagtttcaacaactccttttgcaaaaaagatagctcgttcgtcattatcaggatacaaaaccccgtcttcgtcggcaaaagttgctttacgtttaaaatattcatcattatcaataaagtaaacctgaattctttctttcggaatggaagcaactttaataatcaatggcatatctaagtcattcactaccaagttcattcctgaaagtctaattacttcgtgtaactggtgtcttctctcattaatatttccatatcttggcatgaaaattctaatctgacctccttgatcgttaatcattttcggaacgtcataagacattaaagaaacctcattttcagccagataaggcacgacttcagatgatacatataatatcctcttatctttcataatagtattttacttaatttttggtaataaaaacgttgcaaaattacaaaattttatgcagttattaactaatatattatgtttgcagtaaattttaataatactgccatgcatattttctacggtaaagtagctttgatagcctatttaaaaactatcaaaaccacaaattcgactattggatttgtacccacaatgggagctttacaccaagggcatctggctttaatgcaaagatcactgaaagaaaatgacgataccgttgtaagtatttttgtgaacccaactcagttcaacaaccccgaagatctcgaaaaatacccgcgtactttagaagaagatgtgaagaaaatgagaggtttaagcgacaaaataattctatacgctcctagcgtagaagatatttacgaaggacataccgtttctgaagcttttgattttgacggtttagaaaatcagatggaaggaaaattcagacccggtcattttaacggagtcggaaccatcgtaaaacgtttgttcgaaatcgtaactcctaccaatgcttacttcggagaaaaagattttcagcagctacagattgttaaaaaaatggtcgaaaaaaatcatttacccgtaaatgttgttggctgtcctattttcagagaagacaatcaacttgccatgagctcccgaaacgaacgcttaactactgaggaacgcaaagaagccgctataatttttaaagtacttactgaagcaaaagaaatatttcacaaaggcactcctgaagaaacgattcagtttgtcgaaaattctttcaaagacaacgaaagatttgaactcgaatatttcgtcattgctgacgaatccacattattacctatagaacataaaaataaagacaaaaactaccgtgcctttatagcggtatttgttaattctatcaggttgattgacaccatttcattaaattaatttacctttgcaccatgcaaattcaagttataaaatctaaaattcatcgagtaaaagtgaccggcgctgatttaaattatattggcagcattactattgatgaaactttactagaagcctcaaacattattgaaggcgaaaaagtagcaattgtaaacatcaataatggcgaacgttttgaaacttacgcaatcaagggagagaaaaattcaggagaaataaccctgaacggacctgccgcgagaaaggttcaaaaagacgacattatcattatcatctcttatgctaccctggagtttgaagaagctaaaacgttcaaaccatggatcattttcccaaatgaaaatgataattcgttaacgtaaggttttctctcaaaatttaaaagaatctgtttttgtagcctaaaaagattcttcaaaaaaccataaaaaacagaaatgaccggttttgattttcaatatcggtcatttttactgttttactcgaaaattaacttagcctctgaatgtgcctgttttgccaagaatttcgctaatttaatgtatgcagtctttttctttttaaatattctaataattctgttggcctgtcagtttgtatcattgtagctccattctctataacccaaccccaatttgtatcgggcgagtctatagcacgttcatcttcatgaccggcacacatttcgccccataaggtattcacccaaatttctgttcctctttgttttatcttttttatttgttcaaacataggtgatttttcaaaagaatacagtacctcaaaggcaataggatgagtcttattgaggtagtcatcaacaaacgtatttaggttcgtctgttcttctctgataatgggaatataaaaaacatcatttattagcgaagcatacttagtataaacctcagcataagaatcttcgcctttgattaatgcctgacgaagtgttcctgttttctttaatacttcaacaaccttgtccatatatttccaactcttatcaacatttattagtatctttccttttgcggtaagcataaattcttcaaaagttggaattctttcataagtctttctgtttaaaccaccggtaagataaaatttctgcaattcatcataagtataatccgataatttcccttttccagtcgtggtacgatcaatgctagtatcgtgcattaacactaaaacactgtcttttgtaagcctgacatctgtttccatgatgtcaactcccatctcaatacatttttttagcgctcttatagaattttcaggagcatttctccagtctccacgatgcgcagctacaaaaacatatttactcttggaatcttgcaaaacactaatgagcttatctgcatgagtctgagcttgaatagtttcaaaaaacagtattagcaataccatcgttacgagtatttttttcattttacttttttatgtttggatttaaacaaatttcacgatcagaaaaaaagcatggttttggtgcttattacaattttcatgcttcttttctgatttttactaaagcctaataacctgggttttgtttgatagccggatctgtatttatctctgttagaggaattggcattaagagattatgactatcgattgtaatcaatattccttcacttttaaaccactgattcattaccgttattgccgttcctttgcgaagtaagtcaaaccatctatctccttctccaaccaattcaagttttcgttccaagtcaatagcacttctcagatctacctgatttacagaagaaatatttgcaagccctgcccgtgttcttattaaatttaagtaagtctttgccaaagtaatattaccttgttcattttctatttctgccaacattaagataatatctgcataacgaatcacaactacattacttcctccatccgcaggaactgtactgcttttagtaagttttaaagaaaaaggaactcccgatgctgttatagcaacatacttgcctttacggttatctgcggctgtatacatactatacagatttttggtcggaaggttatgtccctttgctcccgatattgttcctgaaggactaaatatttgctgcatactgcttccttcactattcccatttatgccggaagcaaattgaactgaaaataatatttctttatttgtttccttgttaatatcaaaaacgtctgcaatagacactaaatcatgaatattagaatctttaacttttagcagccatattttagcattttgcaaatcgttcaaggtcaaatagacctttcctaataaagcttgtgcagctgttttaattaccttgcccgctttatcagcctttacaggtaaaagggtttcggcttctgtaaggtcttttataatttgatcatatacaaccttggtcgaagctcttccctgtcctaaataactattaggatctatcgtttcctgagtgactaatggcacatctccatataatcttaccaagttgaaatacaaaagcgcacgaataaatttcatttctcctatccgattatctctgataacagcaaccttaaaggggatcttctcaattctgtttaataccacattagcgcgttgaattgttttataagaatctctccaggtttcgcttatcgaacctacaatacttgtgacactaaaattatccaacttgccaaatgtgccgtcatcatttaatggaacttcatcataagtcgcgtctgaaggaatctcacccaatgccaccatatttagtccataaagtccatttaattgtaatccatcataaacaccattaacggcttcttcaatttcgatttctgtactataaaatttagtagccacttttgacgtgattggattttgatataaatcatctgtgcaggaaaactgcgccatcagacagaaaaaaccaattatttttattcttttcataatagccatctttaaaaagttaagttagttccaaaaattacagattttgtattaggatagatgcgattatcattaaaccccatttcaagaatattagccgtttctgcttcagaattgaaacctctgtatttcgtaatatttatcagattattacccgaaaggtaaattcttgcccttgttaaaccaatcttttttatggctgtcttaggcagattgtaagctatttgtatatctcgaagtcttatatagtccgcattagtaaaagtaatgcttgatcctctggcagcttgtctgtttgacgagaaatttcccgtattgggttgccccaaaaaaccgtccggattattaataggatgatatctattctcaaaataataggtattgggtatagaaaacccttcacctgcttccataaacacggccaattctttagcgaatttttttctgccctgaattccgtttatagagaagcttaattcaaaatctttataagtaaaggaagaattaaaaccataggcaatcttaggagcataacttccaaagccttttttatctttctcattaataattccatccttgttaatatcttccataatatagtctcccgttagggtgccaggcatatggggtgttgtcgcaatttgctcatttgttttataaattcccaaaatattatatccataaagttctgcaattggacctccgacctttgttctgtaagatccttgataacctgttattatttcattctggttatttcccagttttaacacttcacttttattggttgaaatatttcctccgaaattccattttacttgccccagattgatcccgtttccttcaaatgaaatttcaaaacccgaattttttaattctcccgtattttgagtagaagttgtaaatccagattgttgcggtacgggcacatttagaagcaaatcacttgtaatcgacgaataaaaatcagctgtgaaattaaattttctatagatagttaaatccaatcctaaattggttgacgttctggtttcccatgataaattcggattaggggaactggtggttgcaaatccgggatttaattcatttccatatacataattttgaggatttactaacggaatagatccataagaaccaatttgattatttcccgttttaccccaactggcacgtattttagcaaaagtaaaaatcgtcgtttcaggaaaaaaggcttctttacttactatccagcctccggctacagaagggaaaagtccccattttgaattagaaccaaaacgagaggaaccatcacgcctcaaagtccctgtgagttgatacttttctttataaaaatactgagcacggccaaggtaggagatcaatacccatgtatcttttgaactggtcaccttaaaggcgctggctcccgcaatatttggaagattatcatccggtattcctgtacctacaatatctgatgaatttccttcttctctttggtacgtatatcctgccaatagctcaatttgatgctttccaaaatttttagtatagtttaatgtattctcggtaataatattttttgcagttgaattcgtctcagaagctacagctgccttgggagcgggcattctataataacctactgaagacggactgtagaattggtttaaaatatttctatagtctccaccaaacaatgttttaaattgcagcccatcactaatatcataggtaacaaaagcatttccaaacagcctgaaatacctctctacatttgaatttagtttcatgaccgcaaccggattttctgccaaagccccatcttgaggagcatttgcagcaagttgattgccaatagctaaagaaccatctttattataaggactaaaaaatggataggaaataagaagcgagagaacaggattggtattaaatccatcatcctgattgtacttattctgaaccgaataagaagggttcaagctaataccaaatttaaatttatctgataattccgtattaaaccgaattgaagaggtataacgtttataatctgtttcgataacaattcctggttgttcgaaataatttccggaaatgtaataatttgatttttcatttcctcccgaaactccaagtgaataattcgttatcggcgcatctctaaaaacttcatccatccaactggtattcgctaacccttctaatccggggtttttcaggtaattaagtctaagctcacgcttacctgcgccttttgctattcttgtagcttcatcgtcattttcacttcgactgtcaggttttttagacacatacccccaatctctggcttcattgaaaaattgagccgcttgatttgcgtttactatttctactccggaagcctgtctttggataccggtataataatcaaatgatattattggagctcctttttttcctttttttgtagaaaccagaatgactccattagcccctcttgatccataaatagcagcagaagcggcatcctttaaaacatttatagattcgatatcataggaatttatggcgtttaatgttgctccctcagaaagaggaacaccatctacaacaataagaggattagagcctgcggttaatgtacctgtaccgcgaataattatctttgaagaggatcccggttgccctgatgtttcattaacttgaactcctgccatttttccactcaattgttgtacaaaattggctccggcaaccttattaagttcttctgctttaatctgaacagaagaccccattaccttcgtttttgactgtttcccatagccaataactattacttcatcaagaactttagaatcttcctgcagtataatactaaccatacttttatcagatactgtaattgatgtagtaatgtaacttatataggaaatctccagtttatctcctaatgaagcttctatatcaaatttaccttcggaatcagaaatagtagctttattggtttccctatttttaattgttgctccggcaataaaaagccctttattatctgtaattattcctgtaattttttcaatttttgtagctgtagggataaatctattttgctttcttattctaataattttatccttaatctcatactgaacctcctgtcctacaataatttgttttacaatctcatcaatagattgatttgttgcattgatcgaaattatctttcttgtatcaaagtctcccgattcaaaaacaaaagagtatccacttttttccttcagggtttctattgcttttccaacacttacatcattgtaattcagagtcataacttgtgcatatcccgttagatttaggaaatacaatatcatggtcaacaaagtgacctttattttttcattcataaaattggtttttatttatttttttggataactaattccttaagaagagacaatttttatctttataccctgtttcagaacttcttggctagacagttaaaaacatagaaccggaaaacatggttatttttcgattttttgaactttttaaaatactgttactttttttctccatattttttgtttttaaaatatccttttatttattgttaattcaaatcacatccttttacatatctcatttgtaacttgttttattactaccacagatttacttgatgaaacggttttttctaatattagctgttaaataattaattttaaaacacctaattctttaaaagttgctgccttaaatttctattatagtaaaacaagcggttaagaaatatgaaagtatttttactgattagttgtcgagtagtttataagaataagtattatcctttgtcgttatttttaaaaacattacatcgctatccgatctaatattgctatggtttattgtaattttgttatagcctaaatttagatttttggcttcagaatacaattccttaccttgcagattaaaaatttgaatttgaatttcacgattactatttgaattgatatcgatattaaaatagtcttttgatgggtttggataaactttaaattcaaaatcattgtttgtttctagaccctctgtttttgctttttctaattcattattcttatcttcaggagtggatgcaacttctctttttttctgtgtcttattttcttcttttggatatgaaaaatgagtttgtacatgatctttaagttctgaataattaaattcatgtatcttaactatccccggtattttaaattttgtactattagcattagaacctacgcgaattttagcggtagaagtcctctttaaaaattcattcattggagaattagcatcattgaacttgtaatccaaaccaaagtaagttgctgacaaatactgagtgttaattggaattgtagtttgctttatttgcacttcaatccacataaagcgggctgtaaaaaagtatcgaactgtccagactgcatcaacaggagtctggtcttttaaagtaaataacggatcaaataaaagataatcgtaatatgtaccattttcatgatatcttctaagcatcacggtttgattttgatagaagacttctaaaaatcgccctttactgctttcaaaacttaataattgatctccattctttggagcttcaaaatcacatataatcaccagaccatctttactttgtgataaattatccatttgattcgctataagaacctgcgaattatgatctgcttctgatttgcttgtaaatacattattcccataaggtgcaaagtaggaataaggccctgcttgagaaaatgacacattaaaatttagcagcaatagcagtggtaaaagttttagttgtcctatcgaaaaagtacaaaaagaaatatttttcataacggtataaatttacatgtaatcaaaaattggattgtacttgggaccagatatcaggtctgtcagttgtgagaacggatatattaaagtaaggaatactatttaaaaaataatgatctcctctaacgtcaatacgcatatctttaatattccattgtgcccatctgtctacgttccctttaggtcccatagcctcttcagaataaattcctggtcttaatccagttattttatacgtatattcaaataagtttccatataatttacctcctctactaaaagagttaatagtactttcgctctcacttttaaagttggtttcaaaagccataattttattgccggcagtactataccaagtatcaataaattgagctttagactgaatatcgccaccaggttgtaaaacaggaaaatataggattttggaaagcaaatttttgtcgaaatcggctggcataccatttacaatatcttcataggtataggttactttgaatgctacatattttaaggcatttttagtgttcgctacttcaatacattttctcaatattaacatataatcctctttttgcattctgtctgcgtttgttggattcagtagcggatcgtaatcgcaccttgctatgcactccttggtatacatctgatttcgggatttggcagatttaatatcaatggttaatattgttttgtttgcaatcatttcatctaacagatcagaaaaagttataaaattattatcacttacggtcccattgcgttttcttaactttaatgttttcaattcattcagggttttatcataaatataatctgtatctggtccggaatagtttgtaagacggggcaagtaatagtcgtgacttacaactattaaattatctttcgtccgtgtaatatccgattctataacttttgtgtacttcaaggcggcttttattgcttcaggagtattttcaggagggccattacctaagtcgtatccccaataccctctgtgtgcagcaaatactaaattagatccgtgctctaaatttggagatttaattttgctccaaatagtacaaataggatcaccggaattatctaaattatagcaaaagtgatttgaatcaaattgtagatttcctcctgccgaaccaataacacctattcccggtactttgatcctggagaaggttgcatttgtggtaaatacaaaaatatttactttaatattagtcgataaaaaattataaacggatgttttttgagatttatcataacgagatttatcaattgcccataaagcccttttgatatcggcagtctcccaggtatcagggtaattggacagccaggcggcatcactggaagtcattgaattctttgtttgcgtaaatgaagtccctgcaaaattatttgtggtagcagtagtagacagtttataaattaaagtaccttttttaaaaggcctgctttcatcatacgtccaaacttctatttgaatgttaccgttacccaatacctctccaattattcctcccgataaatccgcatccggactaaaaatatttagtaaacttatttcggctgtagtgtttaaagctactttttcctgtcctaataccgtagtaatagatagaaaaaacaataattgactcaaaaaaaacaagcctttctggttgatttttttgaagtaaagatttatactcttcattgtttcaggttttttaatgacgcttgatctctagatttcggatagaatttttcaatccctgatagtcctctttaatcttatccaattccttttgttggtttattgtataaagcataagttcttctattttctccaaaagccttacattcatctcatgcaaattgtagccattttcagatattgacttttgagaaggtatgttaggcaaatgtttatttactgaaataaattcatcgatttcttttagtgtttttaatttgtaagtatcgttaaaaacataatctgcccatgttgctttaggaccaattccgtaatcttcagtcaatatgcccttatgaacaaataaatcataagaacttctctttgaagtattaatttcgcttggctgtacaccaccaatatatacattgtcactagtgtccaaatacatgtttgaacctgttccatttgttccaataaatagaccatgatttgaaccggtaccaatccatccgtcagtcttagtcttattgttagctaatttaacctgaatgccattataatcactagctattgtaccatttgcatgaactttgaattgaggagaatcaatgcctattccaatattttcgccgggaaaaagaacagtatcgttactatcaccaatgtataccttgtttcctaaatctgatgaaatattcaaaccattttcgtctccataactaataagttgtgttttgtaatcatccaccagcaccttaaaattgtcatgttgaccatttgggttagtactggcaaccgttaagtttccctgagagtaaatatctccttttacccataaattggccttgttataagcgctccaggttaatgacattcccatatactcggtagattgatcattatcatgccaccatctaaaaccttctacaccttttagaccactactagggccattgttgtctttatctaccagtaaatcaaatatcgatgcggcataataatacggatatgtatcactagaataaggtaatggaataaaagtttgagcaaaaccggaacctgtaaaaaataaaaaggtaaataaattaaaaaaataatctttcctttttaattgattttgaaatttagttgttttcataaatacttgatttttgtcattaataataactcgttgagtaaaattgaatccgttgatttttaatataatttgtaggtctgtcaaatatatttattgagttagtctcttagttgctgttaattttaaacctgtaattatttgaatctcctagttcttgacgttgtatttttgtacctgattaaaaatcgacccacaaaaaacagaattatgttattgtaagtacataactcaaaaaaccatttaagtcagcactagtaaacaaaaaatgaaatacggcataatctactcagtgaaaacacttaacacactattaaagagcaaaatcaatagaaaaattaagttccttatcatttggtaaatttcatttcattttacataaatttaacccgattttacttatacaaggtgtgttaattaataagtggtatataattagttatatgtggtcaattgatgtgacaagtgtttttttataaaaacttcatgaagttttcctttatctcgtcctgaaaaaattttacctgtttttacccttttgtacaagcctatccaaggataatacaacgtaatttttcctctcattatgctttgtttattgaaattgctacataattagttctaacttcaaaaaacaaatcatcataaaatacttataatttcccatgaagaaagtcttcatttttttaaaagatagaatatcttaaatgcatatatttgttaaccattaaaatgtcccaaacttttaatagatcaaaattcacaactcatgaaaaaagtttacctacttattacttttatttcaatttctgtcttctcgcagaaaaaatttgacaacattaaatccgaaaagctcggagaagaacgaagaataaccattggacttccggaatcttacgaagccaatcccgataaaaaatatcccgttttatacctactggatggtgattatttattcgatcctttttccggtgccgtaagttatggtacctattggggagacttacctgagatgatcattattggtgtccatcaaaacaaaaacgacgaacgcgaagacgatactactattgatcaaaataccgggctgccatttgaaaaaggagccaacttttttgaatttgtgggtgccgaattggttccttatattgagaaaaaataccgcacatcgcctttcaggattatcgccggtcatgacgtaaccgccagcttcatcaatttttacctttacaaagagcagcctctttttaatgcctatattgcttttagtccggaactggcgaataaaatggaaattagaatacctgagaaacttgccaaagtcacagaacctgtattctattatctttctgcagccgatggtgacaataaaaaactcaaagaaccaatcgaaaaattagacagcaatattaaaatcgctaataatccattagtaagttacaaatacgatttatttaaaggcaccacccactatactcaggttttacatgcaatacctagtgccttatatcaaattttcgatgtttacaagcctatcaattcttccgaatacaataataaaattgccgttctggaaaccggatatgctgattatttagaaaacaaatacaatacgatgtctaaagttctgggggttcagattccggtaagaatgagtgattttaaagtaattgaaaatcttattctaaaaaagaatgcttatgatgaattaggcaagatggctgaaattggaaatgtaaattatccaaaagccatgttgggagaatatgaattaggattgatgtacgaaaaaatgggagatcctaaaagagcttctaaaaaataccaaaatgcttctcaaatggagcccattggtgatttgaataaagatttgatgtacgagaaaatggaccagatgaatgcattagcaaaaaccaccaaataatgtcaaaagttaaaacttcctttttttgccagaactgcggaactcaatatgccaaatggcaagggcaatgcaatgcctgcaaagaatggaatactattgccgaagaaattatccagaagcaggaaaaggtagcctggaaaagcgaacctacttcaaacggtaaagcgccgcgtcctttaaaaattaacgaaattgattcggcacaggaaattcgaatgaatactactgatggtgaattaaaccgtgttttgggaggcggaattgttcccggatccttaacgcttttaggaggtgaaccgggtattggaaaaagtacacttttgcttcagatttcacttaaactaccttacaaaaccttatacgtttccggcgaggaaagtcagaagcaaatcaaaatgcgcgcagagagaatcactcctaacagtgacaattgctacattttgacggaaaccaaaacacagaatatcttcaaacaaattgaagccatacagcctgaaattgtaattatcgattcgattcagactttacataccgattatattgaatctactgcaggaagtatttctcaaatccgagaaaccactgccgaactcatcaaatttgccaaagaaactaatattccggttatcctgatcggacatatcacaaaagacggaaatattgcaggccctaagatcctcgaacacatggtcgatacagtcttacagtttgaaggcgatcgcaatcatgtgtaccgaattttacgttcgttaaaaaaccgttttggttctactgcagaacttggaatttacgaaatgctgggcagtggtttacgcgaagtatctaacccttctgaaattctgatctcccataaagacgaagaattatcaggaacagcaattgcgaccacacttgaaggcatgcgtcctttgatgatcgaaatacaatccttagtcagtaccgcagtttacggaactccgcaaagaagcacaacgggctataatgctaaaaggctaaacatgattctggcggttctcgaaaaaagagccggatttcgtttaggggccaaagatgtctttttgaacgttacaggtggaatttctgttgacgatcctgcgattgatttagctgttgttgctgcaattttatcttccaacgaagacattccggtaaccaaaggtttctgctttgccggagaggttggactttcaggtgaaattcgcccggtaaatcgtgttgaccaacgtattcaggaagctgaaaaacttggattcaccactatctttgtatccaaatacaataaaattgctttaaaggatactggaatcaaaattgagcttgtggctaaaattgaagatgtagcagggattttatttggataattcgttttttcgccacgaattacaccaattaaacacgaacttttatttaaatttagtacaagttcaaatttgttcgtgttactctaattcgagaaattagcggctgaaaaactgttcattttgcgaataagtgcactttttatgaaattaactttatgaaattctcaaaacaaaaaatatacaaagtactcttcatacttgcattagtattggtagtgttttttttagggttttacttttttcgcgattcacttctaaaacaagctatcgccaaagtaacccacaaaatgaacacggaatacaacagtacattttccgtaaaatcggcttcatttgacggtttgtccggcataaaattaaccaacgtgattttggttcctaaaaatgccgacacgctttgccatattcaaaaaatagaaaccagtatcagtcttgctaatttattgattggcgatgtacaaattggaactttaaaaatcaacaacggttacattcagttggtcaaaaaaggaaatattcgcaattttgatgctttcttaaaaaaagataaatcagattcggataaaaatgaaaaacgcaaatatgccacctttgcttatcgcatcatttcgaaactattaaatctggttccgaccgatatgaagctcgagaatttgactttcagaatcgatgacaatggcaaaaaaacgtctgtagccatcaacaaactggttctaaataacaagcagcttgaaaccaatcttcatgttcaaagcaaagattttgatcagcgctggaacatcaaaggctttgccgatccgagaaataaaaaagccgatattcgtttttttaatctggataccggagccattcgtgttccgtacttagacgaacgatacaacttaaaagcgagctttgattcgattcgcctgaatgttcagaatattgaaaaagacggcagtgaattacaccttgatggttatacttcaatcactaatttaaaaatcaatcatccaaaaattgcaagcaaagatgtcataatcaaaaatgcccgttttgattatcgtttcttacttggagatagttttatttcgattgacagcacttcaagcatgcagttgaataaaatcaaactgcatccttatgtttcttataacacggagaaagatactgtttatactttaaaagtaaacattccgaaaatgcaggcacaagattttattgtttctctgcccgaaggtttgtttacccattttgaaggaatggaagctgccggaaattttgattataagctcgattttaaattcaataaaaacaaaccgaatgctttagtttttgacagtaaactcaacaaagaaggtttaaaaattacgaaatacggcgaagctgatcttaacaaattaaatggcgaatttgtttaccgggctattattcaaaatgtactacagcgaccaattttagtagggaatgcaaatccaaactacacgcctttagatcaaatttcaccttatttgcgaaaatgtgttctgacaaccgaagatccgtcgttcttttcgcatcgtggttttatcaatgaggcttttaaacaatctatcctaaaaaacatcagaacgaaaaaattctcacgcggcgcgagcaccatcagcatgcagttgattaaaaacgttttcctcaccagagaaaaaacgctttcgcgcaaactcgaagaaattttactggtatatattttagagaacaatcgcgttgtaagcaaagaaagaatgctggaagtttatttcaacatcatcgaatggggacctaatgtgtacgggattggagaagcaagtcatttttacttccagaaaagccccgctaatttaaatgttgatgaatgcctgtacttagcgacaattattccaaaacccagaaaattcatgtatcagtttaatgatcaaggtaatttaagggattatgcattgaaaaatcaaaaattcctgaagaatttaatgttccgaagaggtttgttggttcctgaagatactcttggacaattacccgtttacatttcgggaaatgcgcgttccttgatcagaattaaagctccggattctacagcggtgaagaatgattctttggctattgccgatgagtttgatttgtaaaacacggatttcacggattggcactaattttaggcttaaaatcgcttatcctctacataaaaattccacaaactaacactagttcaatccgtgttaatttgtggaatttgtgtttgatttagtagtactaattaaggagcaggatcaggaattatggcctgaacagcattaatttcggctatgatttcttctgacagtactacatcaatggtatcaatattttcctttagctgctccatagtcgtggcaccaataatagcacttgttaaaaatggctgctgcaacacaaatcccattgctaattcagttaaggttaaaccatgtttaatcgcgatttcctgatataactttgtggcctgtgtactttgtgcactgttgtaacgtgtatattgcggaaaaagattgattctggcatttggatgcgcttctccggttaaaaatttacccgtcaaaactccaaaagccaaaggagaataagccaacaagcccacattttcatactttgaaacttcggcagaacctacttcaaaaagacgattcagcaaactgtacggattctgaactgttttaatccttggaaggttctggtatttgctttcttctaaaaagcgcatcattccccaggcgttttcattcgaaactccaatatgttttattttaccttctttaattaagccatcaaatgtttctagtacttctctgaagttatcttcccaaacatcattgtgaccgttaaaagcgcgctgtccaaaacaattggtttttcgctccggccaatgcatctgatacaaatcgatataatcggtttgcagacgtcttaaactgttctctaaagcatatttgatgcttgctggtgagaaatcacctttttcacgcatgtatgtgaacgcaggattcggaccagcaattttagtagccaataccactttgtcacgatttcccgatttcttgaaccaggttcctataattttctctgtacttccgtaagtttcttcacgtgctggaacggaatacatttcggctgtatcaaaaaaattaacgcctctctccaatgcgtaatccatttgctgatgcccttcggcttctgtattctgttgcccgaaagtcatcgttccgagattgattttactaacttttatgtcggtatggggtaaagtggtgtatttcatattttttaagttgctaagtccctaaggagctaaggttctaagtttttctttaaaattctaataattcaaagatacgatgctatttctcaaatagaaatttgacaaaagttaaaaaaattacaagattttttccaaaacttctgaaatattaaattgggggattataagttcttacctttctaacaaaaaaaggtccaaagcaaaactttgaaccttttcctaaaaaccttagaagcttagctccttaaaaccttagcaccttaatttatactattaagcatttccgcaatctcgtctaatcttggtgttaaaatgatctcgatacggcggttttttgcttttccttccggagtagcattgcttgccagcggagaaaattcgctacgacccgctgccgttaatttttgcttattgattttagtattttcgcttaaaatatttacaatggcggtggctcttttggtagacaaatcccagttgttggcaatcggtcctgaacctgcgtacggatcatcatcggtatgcccttcaattagaaccgaaagatccggattatcacccaaaacttttccaagttccactaccgcttttctaccttcggtaccaacggcccagcttcctgaattaaaaagcagtttgttttccatcgaaacatatacttttccgtttttctgttctaccgtcagcccttttccttcaaaaccgtttaatgctttagacagcgtctctttcaatttacgcattgcctcttcttttgcggctatcatcgcttcgagttcgttcagacgatttgctgttttatctaaacgagcctgttcatcagccaattttttagatttcgcttccagttgtgccaaaagttcacggtttttagccatattactttctaaagcatcgttgctgtttttctctaacgcattgtaagagtcctgaagtactttgtattttttctgttgagcagccagatctgctttttgtttttcaagatccgctttagttgcatttaaatcttttgttaaagcgtcacgatccagttctaactgattttttgatttctgtaaactctcgttttcatcagcaattgcacggttttcttttttcagatctgaatatttggtttcaagatcgttgtaaattttcttggatacgcatgaggtcatagtcattgctacaaccaataatccgacagaggcctttttaatcattttttgttttatttggagggtattaataatcgtataatgtcaaaactcaataccaatgacagcgtcaatgtttaaatttaaactgcaattcattcaacaataacaataccacttttactcgatttcgactaaaacaggacaatggtctgaatgaacggcatccggaagaattacggctctttttaacctatgctccataacattactcaccagattgtaatcgatacgccagcctttgttgtttcctcgggctcctgcacggtaactccaccaggaataatgatgcggttctttattaaaatgacggaaactgtcgataaaacctgatttcataaatccgtcaagccaggcacgttctgctggtaaaaatcctgaaaccgttttatttcgaaccggatcgtgaatatcaatcgcttcatggcaaatgttgtaatccccacaaataatcagattcggaatcgtcaattttaattcgttaatataagtttgaaaatcgtccataaacataaatttatgatccagtctttcaatattagttcctgaaggcaggtacaaactcattacagagcaatcgtcaaaatcggcacgaaggttacgcccttcaaaatccatatgctgaattccggttccgtacaccacattattgggttttgttttagataagatagcaacaccactatatcctttttttgttgccggataataatattgatagggataacctgctgcggtaatctcctcaaccggaatctgttcttcagtagcttttatttcctgaagacaaatcacatctggattagcttgttgtagccattcaataaaacctttggttattgcagcacgtattccatttacattataagaaataattttcatcagtgttttttttaggatttcaaatgtaataaaaaagtggaaagtttgcatttgaaacagcgaaaagtagagttttttgttatctttgttcgctgctcttaataaattaaaaatagtacatgggtttagttaccgcgaaagaagttgcaaaagcgataaatgttgataagtacggagttttgggtactttttcgggctggcttcttatgaaagtccttaaaatatctactcttaataaaatttacgatcataataaacatttagaggatgttgcatttctaaacgggattttggatgagatggaaatcaaatttgaaattcccgaagaagatttaaaacgtttaccgaaagatggtgcttatattaccatttcaaatcaccctcttgggggaattgatggtattttacttttaaaattaatgcttgaaagagaacctaattttaaaatcattgccaactttttactacatagaattgttccgttaaaaaaatacatcatgcctgtcaatccttttgaaaatcataaggatgccaaatcaagtgtggtgggtattaaagaaactttacgccatttaagtgacgggaaaccgttgggaattttccctgcaggggaagtttcgacatacaaggatggaaaattagtcgtggataaaccatgggaagaaggcgctttgaagttaatccgaaaagccaaagttccggtaatccctatttacttccatgccaaaaacagtaagttgttttattggctttctaagattgacgatactttacgtacagcaaaattaccttcggagctgcttacgcaaaaagaccgtgtgattaaagttcgtatcggaaaaccaatctcggtgaacgaacaaaatgaaatcgaatcatttgaagaatattcagaatttttaagaaagaaaacctatatgctggctaatccttttgagaaagacagcaaattattagacaccgcaagcctaaagattccgaaagcacctaaaaaaattgcaactccggcaaatgagtcaaaaatgattgacgaggtttgtgcgttaagaaacagtgactgcaggctgctgcagagtaaaaactacgaagtattttttgcgcgtgcaaaatcaattccgaatatcttacacgaaattggtcgtttacgtgaaattactttccgtgaagtgggcgaaggaaccaacgaatctattgacttagacgaatacgaccagtattatcaccatatgtttttgtgggatgatgacaccaaaaaaatagctggtgcttatcgcatgggattaggttctgaaatctatccaaaacatggtattgaaggtttttatctgactgatcttttcaggttcgaaccggaattgcatgatatgatgcacaaatcaattgaaatggggcgtgcttttatcatcaaagaataccagcaaaaaccaatgcctttgttcttgttgtggaaaggaattattcacaccactttacgttatccggaacataaatatttgcttggtggtgtaagtatcagcaatcagttttctgacttctctaaatcgttaatgattgagttcatgaagtctaactattatgatccgtatatcgcacagtatattcacccgaagaaagcttataaagtaaaacttaaagacgctgataaagattttatctttgacgaagccgagtctgacttgaacaagtttgacaagattatcgatgaactggaaccaggaaatttacgtttacctgttttaatcaagaagtacatcaagcaaaatgcccgcgtagtcgcttttaacgtcgatcctttgttcaataatgccgtagacggtttaatgtatatcagaatagcagatattcctgaaagcacgatgaaaccagttattgaagaatttcaaatagaattagaacgcaaattatcggagaaagaagattaattgcatcatcatacaaacaaaaaatcccatcgtaaaatgggatttttttatgctttaaaacgacttaaaaccagcctttttgaccaacctgataggtttgataaaattcttcgtctgatctggtgagataaattattccttcgatcacacctattataccgcctattccgaaaataaatccgagaataagctgaataaccccttctttattgtatcctaaataaaacttatgaatacccagcgcacctaataaaattgccaggattcctgcaactacttttttattctcctcccgatgaaccggaggattattccaatgttctgttttactgttttccatttttatagtgtttttttagttattctaaattcaactttaagcggatgatattcttagacttaaaaccaaatggactgatgtaaaatatcatcaaaagagctttctctgataaaaagaaccaagcgtatcaaatgataaaaggctaaaaaataagccatattgtaggctaattttctattgtacagaagtcctgtaaaatattcttttttagtaataatttcagtagtcagtataatgatggtaagccagcaaaatacaattacaaacggccccagaatatggtaactaagcgacttgtagatatcgccttcataaaaataaactaatgatttagtaatcccgcaacccggacaagggaaaccggttaccattttaaaaggacaaaacgactgatctgtctccagatggtcgttatggttgtcgagcattaaaaaaaacggaattatcagtgtaattgctgcaccgataattccgtaaattttacgttttattctactattatttgtataatctgttgatatcaccttgtacaatcattgctgctgccataggaaaaaagaaccctaaaacaattaataaagttgactggtctttttgaagctctccagttctttgatatacttttggcaacgcttctttaccagctaaataataaaaataaatatttaccggcatacagcatcctgcaaagattgcaactggctgagagataacctcttttcctgctacggcattaaaaacctcagatactttaatattccaataaatcaagtacaatccgcaagttaaaaaactaaaaagcaacaccattattggatctactttgaataccggaatttggtcattaaaattatttgacgtttctttaaaatcgttttccattttttactagttaaaattaattggttatgtcctactcttgggattttcggttactccttatttagaaacaatattattaaaaaataatcttaaaaactaattataacccaaaaactctacagaaaaaactcgttatttaattgtaaaaaggaagctgaatttcaatctcaccctacaagactatctattaaagaccacttttatcttatcggctatcacctgagccagtcgtttatgactttcgaatgtccagccggcaatatgaggcgtcagtaaaacatttttagactccattaaatatcgcaaggcttccggcgtactttcttcctgaaataaggtttcgaaagataatttctcatactccaaaacatccagacccgcgcctagaatctttttagttttcatcgcctctactaaatctgctgtgacaatgtttttaccgcgtgaggtatttataatccaaaaggggtttgaaaaagcatttataaaactttgatccaccattttatccgtctcaggagtccacgggagatgaagactcaacacatcgcttttttgctgtagctcagctaatgacacctgtctcgcattttgatctcctacattatccagaatatcgtaacacaacacttccgtttcaaagccgcgaagttttttcgcaaatgcttttcccatatttccgtaaccaatgatccccactgttttaccatccaattcatgaccgcggttactttcccgattccaatgtcctgatttcacttcggcatctgcctgattgagattattaaacaaggacaaaatcactcccagcgaatgttctgcaactgcatttcgatttccttccggcgcggcaattaaatgaattccttttgtttcggcatactcgcagtcaatactttccaggccagcccctacacgagcaataaattttaagttagttgcctgatctaaaaaggtcttgtcaattttaaaacggcttcggatcacaattccgttgtagtttgcaattttcgcttcaatttcttcttttgaagatttaaaatctgcatggttttcaaaacctgcatcttccaattgttgccataaaaccggatgattgctatcaatatgaagaatttttatactcattgtactctattttataaaacaaaaatacagcttattctttatttaaatttcccgtttcaactattagcttccggagttcacagagatgtaaagaaaaaaggtcttaaaaaaatggactgtaatagcttcccggtttcctggcaagaacattatcccctgaagttaaaacagttacaaattaaagttctctatatcttaacattaacgaattatttaatttcatatatttatgcatagatttttacttcggaggacaactcgccccattttgctacatcacatattgaattttaaattaaagattttattttaatcaattaaacaacagtaattatggcaacaaaagatttaaccattattttggttcacggtgcttggggagatggttcacattggcaacatgtaattccgggactagtaaaagaagggtataaagtgcgaagcgttcaaaaccctttgacttctttacaagatgacatcaataaaactcaggatctaattgatgctcaggaaggaaaagtgcttctggtaggacattcttatggaggagcagtaatttcgggtgccggacatcatgataaagtggtaggcttagtttacattgcagcatttgctcctgatgcaggagatagcctgggagctcttttaggtcgtagaccaggatcgggcggagccagtatttatcctgacccaaaaggttttctatggattaaatatgacgagtttcatgacgcatttgctcaggatttagaccataaagaaacactggtcttatcactggcccaaaaaccgatacacggacaatgttttggagacatcgcaggtgaaccggcatggaaaaacaaaccaagctggtatcaaatttccaacttcgacaatatgattccaccggaaacagaaaaagaaatggcggagcgaataaaccccaaaaaaatcattcgtctcgatgcaggacatgcctccctcgcatcacaccccaaagaagtgacagccttaattttagaagcagctgctacattctaaaaaacactccgaaccgctaactattagcggttttttttatttaataccgcaaccgcatcccgcaacgcgatacacctgaattttttattcgttcatttttttttaactttgaaaatatatgcctccaaaaaatcccttctaaattcactgaacttttataaaaatgaaattaacaaaaacttttaaagccttcttcaacaatgaaaaatcaggaggactactcctgctttttgtcaccatcatatcgctttatcttgccaattcatcttatcaaacggaatatattgctttctgggaaaaagacctcaacggacattcaattacacactggattaatgatggtttaatggctattttctttttgttaattggcttagaattagaaagagagatttatcatggtgaattgtccaatattaaaaacgcatctttacccatcatggctgccttaggaggcatgctagtgcctgccggtatttttctgattttaaattttggaacagcaactcaaaacggagcaggaatcccaatggcaaccgatatcgctttcgccattggaattttatctcttttaggaaaaaaagttccttcgtcgctaaaagtttttttaactgccttagctgttatagatgatttgggagccataatcgttatcgctatattttatacaacctcaatcgcatttataaatcttgcaattgcgttgggaatctgggttttcttgtttgttttgaatcgtttgaaagttcacaaccttatcccgtatcttatcggaggtgttgtaatgtggtatttcatgctaaactcaggtgttcatgctaccatcacgggagttattctggcttttgtaattccatttggaagtggcgatgaaaattctgtttcttataaattgcagcattttctacacaaaccggttgctttttttattctgcctttgtttgctgttgcgaatacctgtatcgctattcagtcggactggcatgaaggtttgaatcaccctaatacatttggaattatcctggggctcgtagtagggaaacctttaggaattttacttttctcggctattggtgtaagtcttggattgtgcagcttgcctaaaaacttaaaatgggctcatatactaggtgccggaatgctgggcggaattggttttaccatgtccatcttcatcactattctggcttttaaggatcctgaaattattgttttctcgaagatcgctattctgattgcctctgtgctttcaggtctttttggattattctatctaaagtttactttgtcgaagaaaaagaaggcctagtttttcataaaacaattaattctacaaaactctaaaaaacacaaaatccaaattccaatgtatcaacacctggaatttggatttttaaaataatatcgtttataactatcctttgatttgcttcaaagaggtcttaattcctttgattagtgatgagctgaaaccattatgctccatttcattcaaacctacaattgtacaaccctgaggcgtcgttacacggtcgattaattgttcgggatgtacttgttcctccagtaacatttttgccgctcctttgactgtttgagcagcgatagccaaagcggtattagaatcaaatccaatttcgattccggcctgcatagaagcgcgaatatatcttaaggcataggctgttccgcatgcgccaagaacggttgccgcatccattaatttttcgtcaattaccggagcagtccccaaatcctgaaacaaatcaacaattggtaatgctttttctctgtcttgttcaggaaaagaaatacaggttgccgattcaccaaactgcgcagcaatattgggcataattctaactactgcaaattcattattggttttagactgaagcatgtccagagacaatccacttacagccgaggcaattgtttttcctttaataacaggcaaaatctctgctaaaacagtgtctacctgatagggttttatggttaaaataaccacatcagcttcctgaatagtatgtttattatctgatgaaaccgtaattccatactctgataaatactgaatactggcggtgtttcttcttgtaacggtaacctgattatttttagagaatttagcaattcccaaggcaatagaaaccccgaggtttccgcctcctataatgtgtactttcattgcttttatttggctggttaatagcgaattattgggttacaaattacgccgattttagagatcaataatcactcttatctattaatttgttgcaaaaacttagaatccaagaataagtttggctactccgaagtagagcataataccaaatacgtcattggttgtggtgataaaaggtcctgttgcaatagcgggatcgattttatttttatgtaaaaacaacggcactaaagttcccagagtcgctgcaaacaaaattactacaatcatcgaaattgaaatggccattcctaccaggtattgttggtacataatggaatgatatcccagtaaaagtaatgaaataatagttcccgaaatcatcgaaacggttatctccttgctaaaatatcctctgctgaattcttttaatgttccgtttgccaaaccctgcacaacgattgccgaagcctgaactccaatgttacctgctgtcgcagaaagcaacggcacaaaaataatcagagttgaatatttctgaaaagtggcttcgttaccctttagtacaaatgatgccacaatttcgattaccattccaattaaaagccatggcaaacgtgccttggtcaattccagaacactatcgttagattcaacgtcttgtgtaatacccgctgccaactgataatctttatcggcttcgtccttaattacgtctacgatatcatcgatagtaattcttcctgccaaacggcctaactcgtctaccaccggaattgcttctaagtcatacttctgcatgatacgggcaacttcaacatcttcggtatcaacatttacaaaatttaactttctgatgtaaatatctccgatctgtgttttggtagaagtggtcaataaatctttaagagacagcctgcccttcaaacgattctcatcgtcaacgacataaattgaatgtactctggaaacattctcggcctgaatacgcatttctttgacacaggtaagaacattccagttttcattaactttcaccagctcttttcccatcaaacctccggcagtattctcgtcgtaacgcagtaattcgacaatgtctttagcgtgctcaacgtcgtttaactcagagattacctctgctttaatgtcctgcgaaagttcggcgataatatcggccgcatcattggtttccagctcatcaagctcttctgcaatctctttaggcgacagacggcttaagatgttttcacgaagatcatcttctagttccagaagaatctcggccgttttatcactatctaaaaccttaaaaatataggtagcatcgtcgaaatccagctcgtccagaatttcggctatatcagcatggtgcaaatcattaagtaaaatttcaagttccttgtcatttttcttaacaatgtgctcttctaattgttggattaagtctttgctaactttgaactccatcggcttctattttttgagtcagttcaataaattcttctacgctaagctgttcaggacgtttatcaaagatagtgtcttctcgcaacttatcagttaaatttaatgttttcaaactgttacgtaatgtttttcgtctttgctgaaaagccgttttcactactgtgaaaaacaatttttctccacaaggaagactataatcttcctttcgggtcattctcatcacacccgacttcaccttgggcggaggaataaagacgttttcatctactgtaaacaggtactctgtagtatagaaagcctgggccagaacggataagattccgtaagcctttgatccttttttctcgcagattcgttctgcaacttctttttgaaacatccccgaaaattccggaatctgatgtttaaattctaaagttctaaaaacaatctgtgttgaaatattataagggaagtttccgataatagcaaattgcttgttctcgtaaacctcattaatattgtacttcaggaaatcctgagaaataatgttatcttttaattttggataattttcacctaaatacgccaccgattctgtgtcgatctcgatcacgtgtgtattaattggtttgtcaagcaaatacttagtcaacacacccatccccggccctatctctaaaacctcatcatatccgttcaggcttaaggtatctgcaattgctttggcgatactttcatcctttaaaaagtgttgtcctaaatgttttttagcttttactttttccattctcttttctagattcttagattgtcagactccctagattgttagattattaaaatatcgaatactctaacaatcaaatcatctacttcttatttatttcacgaagttgctgaatatcgagtaaatctttagctctgttcgctttaatcttacttgtaatcaggtcttccagtgataaaacattccattttaaaaatgttttatcattaaccgttgtttcttcactatccctataagcctcatcaaaagttttatttaccgaaaatctggtaattaactccaaatctaagtctgtaggcgaaaatttaacggatatattctgttcttgtcttttcacattatcaggaaaatcatcaatttcataccccatatcgttaaaaacaagaatcagtcttttaaaattctctgctgttgtctcgatccaaaaatcaacatctgctgaatgtcgctgataaccatgaaaattaaccgctcctccacctaccataagcatacgaacctgatgtttattggctaaagtgataaattcatcaatgttttgattccacaattttgacatcctattttggtttaatcacaatgagaaaattatctttattcttatcctctttattcttaatcggaaacctgcttacctgttccatcaaacgaaaaaaagcgtaaactctttcggttttagacaacttcaggaaatcttcctgttgctgtttgttgctttcttcttttgtttgaaaccgaatctccatcttttcttagattgttagactgttagatcgttagattgttggattattcgaaaaatctaataatccaacaatctcttttaatgttccgaaatcacttccagctctgttctgaaagaaagcattttatcagcgaataattccaacgcttctctatgaaatgccggttcgtcttcgatataataacgttctaacgtttctttgctgtctgtaacatattgaacagaataggtaattccacccatttcttcctcaatcatcactctgacaattcttgccgaagaaaacttttgtgtggccagaatttccggtatatgtttctcttgcatccactttaaccatcgctcctgaacgctctcgtgtatattggtagtaacgttgtaaataatcattttttctttctagattgttagacttcttagacttcttagaatgttagattaatgcttattaaacttagatgctgagatattttgagatctaaacaatctaagtgatctaaaatctaagaagtctaatgagctaaattataaattcttgtctcctcttaactcccggtatttttttctggcatcaacaaagtaaatactgtcctgatgattaaaaattaccttctcatataaaggctttgccttttctgcattatgcaattcgtcgttgtaaatttctgcagagaaaaacaaggcttcgtcgatataaattccgtcaccatgatagtcaataatctgctggtactgcgccaaagctgaggtgtaatccttcaggctttcgtaaattttacctaaacgcaacattgtaacagcttcaatttcctgccctttaaacgttttcaatatcccttgaaactgagctattgcttcctgctttttattctgatacatcaaaaaatcacctttggcaaactgcttcaaagcggtttgtgttgaatcggcaactgtattgtcgttgatcagtaaaaaatactcgagtgcatcattggcaattaattgcgtatttgccgccttcaattctttaaactgtttcaaagcccactcgaaatcacctttgtaataacttgttttggcggctttcaaactcgcttcatgcgccattacatcattcttcaaatccaattgaatttgcgaataataaataagtgcctgattgaacttctcttctaaaagcagaatgtctgccagttccattttcgcatctgcctgctgataggcattcagatttaattccagcgcttttttaataatatccttaccttcttctgtctttttgagactaaatgccaggaaatgtgcctgaattatttgcaaagataaggtaaaaggagttatttcataggttatgagcaattgttgtagttcggaattgattaatggatactctttttcctgcgctttatcgatttttatctgcatcaaagacgaatttgtctgaatgagtaaatcacgatctttagtcgtctgaagaataaaattaaaaatttcctctgctgtgtcagtgtcatcttcatttaacgcaaattgtcccagattaacaatgcttgagagtgattccgggtcgcgtttgtaaattgctttttcctgaataaaggctttaccgaattctttctgctgtacataaaaccaactcagataatgattccaaaacacatcctgatctttttgtgttctcagaatcaaagcttttcgcatcgcatctttaaaagcggtattatccgtttcaccgttcatgaaacgagacagctgtgtctgtattaaatttgcgttctgtggatttttgtacgattctgtcagcagaagatcaatcatctggtccgtctgccctaactgtccgtacaacattccgatttgaaaattgaaattataattcggctgaattgacatggcggtctgataggctcgtaatgcatactcaagcaatacttttttctcaaaagaattaccaactccgtaaacatcattcggattggttttaatcttttcgatcgcctgttcgtagtaacttttggctttcgcatcgtttttctgcagttggaaattataccctaactctactaaaaaaacgccttgtttgtatttgttgtaacgatcctgaattactttctgtgcagtgtcaaactgctgcaactgctgataacagtcaattgttcttaaaaaatattgtgtattggacggcgaactgtttaaaagttcttcgtaactgattttagctttttcaaaatcacctttatcgtaataatactgcgcaagctgttcattctgtgaaaatgcaaaagcagaccagaataagacgatatagatgatgctgtttttcatattttagcttttttttcagtgttcagtgacagtttatagtcacagttctcgatctccgtttgcagtcgcagtttacattattcaacgtagaccgagactgagaaccgcgaatgaaaactaaataagaacattcttcttagacttccagacaatcagtcccagacctatcaaaataaaaggaatactcaatatttgccccatgttaataagcatactattttcgaaagcttcctgattttctttgaaaaactcaattataaatcgcgccagaaacagtaacatcaggaaatagccaaagatcaaaccatccgtttttcgtatcttctctgatttgtacatcatcaataaaatcacaaaaatcaacaggtaggcaaaggcttcatacagctgtgtcgggtgtcttggaatcaaatcatctctctgaaaaaccacaccccagtttccattggtaggttttccgtaaatctcagaattcataaaatttccaaatctgataaaagctcccgttaccggaactccaattgccattttatctaaaagccacaggaattttactttatactttcggcaatataaaaccatagcgattagaactcctattgaacctccatgactagcgagcccttggtatccaacaaatttataaactcccgcaactttttgtatgggcaacagaatctctataggatgctgtaaaaaataggacggttcgtaaaaaaaacaatgtcccaatctcgcacccaaaatggtcccgacgatcacataaaccaataaactatcaagattatcgagcgaaagattttcttttttgtaaatattacgcactatagcgtagcccagcagtaatccgcaggcaaaaaaagcgccataatattttaatggaaaactatctgtaatccaaaaaataacgggatctgcgtcccaatttaaaatccctcccatcttcctctttttttagtattcagtctcggtttacagtattcagtcgcagtctcaatattcagtgcaattcactggaaactgaggctgcgactgtaaaccttatttcaatcttaatttataatatcaaatccacagtatggacgtaatacttccggtactacgattccttccggagtttggtaattttctaaaattccggccaaaactcttggcaatgccaatgaacttccgtttagggtatgtgccaattgattttttccgtctttgtctttgaaacgcaatttcaaacggttggcctgaaaagtctcaaagttagaaactgagctgatttctaaccaacgatcctgtgccgttgaaaacacttcaaaatcataagtcaaagaagatgtgaagcccatatcacccccacacaaacgtaaaacacggtatggtaattttaattctttcaaaatgtcttttacgtgttcgaccattccgtctaatgcttcataagacttatccgggtgctccacacgtacaatttctactttgtcgaactggtgcaaacgattcaatccacgcacgtgagctccgtaagaacctgcctcacgacggaaacatggcgtataagcggtatgcaaaaccggcaaatcgctctcgtttaaaattacatcacgaaacaagttcgtaaccggaacctcagcggttggaatcaaatacaaatcatcaacagttgaatgatacatttgcccttctttgtccggtaattgtcctgttccataacctgaagcttcgtttaccaaatgcggtacctgaacttcgttgtatccggcagcagtatttttgtctaaaaagtaattgatcaaagcacgctgtaaacgggctccttttcctttataaaccgggaatcctgctccagtaatttttacacccaattcaaaatcgatgatatcatactttttcaccaactcccagtgtggttgtgctccttcgtgcagaaccggaatatcaccttcctgaaaaacgttcagattgtcatctggtgtttttccttccggaacaatatcagcaggaagattgggtaaagtgtataatttattggttaattcggcggctaaagcttctgctttttcacccaattctttgcttttttcttttaaggaaactgttttttctttcaagattgcagctttcgatttctcgccagctttcatcaattcccctatatctttggacaatttattagattcggataaagtgttgtctaattctacttgtgttgcgcgacggttttcgtctaattgcaccacttcttccacaacgcttttagcatcgatatttcgttttgctaaagccttgattactttctcctgattctctctaataaatgcgatttgtaacatagcttgttttttataactattgtattttttttataatggaagcaaatttaaggaaatgtttcctaagatcatgacaaagttggttctaaagttatttcgaggctgtaccacagagattcgcagagaaaacacagagatacgcagagattactcttcactctttactcttcactctttactcttcactctttactcttcactcttcactcttcactcttcactcttcactcttcactcttcactcttcactcttcattttagtacaaatacccctttatagaaataaccgctaaattttagtacttagcggctattgtcaattctattgattatttgaacaattggttttaaaagagattattttttaccatacagaacacctttttttattgactttttatttagttctcctttttcaaataattgctccagaattgtatgggcttcggcataagaaatatccagaataacggcatactcttttggcgcaagagtaggataaatttcaaatagagctaatgggtgctcagttgctgtttttttctttttagcgtcaggaaacagggctaatactgcattttcataagaggcataaggtttagaaccataaacggttaattgattttggttcccatcagagaaaaacaaagtagggaagcctcgtacgccaagacttctggcatagtttagatcttcctgaaaaagtacttttgcttctccttcgtaatcccattttaattttttgatctctaaaccggaaagttcagccgcttcagaaatgttttcccatttcgcaatatttttcctttcgagatacaatttctccctaagaatccgtataaactttaccgctttatctttactctgaatttgcgctgctttcatcgcaatacaagatggataggaagaatcgagtgggtcttcgagccatacatttccatcgataggcatttcatagtacaaacttgcttcttcccagtgatgcgcgacatctgatggtttgctgattccgccactattgtaagaccagtccggaagtaaaccgcccattctgtaatcaatatcgatataattgccgtattcgagttttagttttcttaactgaggttcaattccccaacaggaagaacagatgggatcagtataataaataatttttatcggtttatctgctgttggaatgatggcagtttcctttgctttttcgtgaattggcatttcgcaggttcccgtttcaggatcacataatagtggatttgttttgtctgtactcatttttgaatttatttgtgattgacagtttgtactgcagatcagaattaataatagcgacagtcttttcataaataactgttttagatttacgcttcggtttaaattttataattttactgtaaagttcgtccatctttaatcacaagtcaattagtctaaaaaatatgactacagcaaatatatcagaaacggagaatgaatgcccggcagaagggcttttaaaattgctttcgggcaagtggaaaccacagatctttttgctggccgttactggtcctttgcgtttcaacgcacttttaagagagcttaaaggagcgaacaaacaatctgttgcaacggcacttcgggagctggaagatttcggaatcctggacaaaaaagtagttcgtttaaaacctttgcatatcgaataccatctttctgaaaaaggagcatcattagttccggttttcaaacaattggagattttctcaaaagagtagaatagtaagtttgatctaactttagaataaaataacatctgttgagcgtagttatttttaaacgcatagaaacatagatgtaacactttcacaaaaggcgtttcacttagtttaaaacatgcagagactactaggtgttaaatgatttttttattaattacaaccaacggtttagtataattaaatgatataaacgatgaaaaagctattgttattttttgtgttgttgtttcaaatggctgtaataacaggttacagtcaaagtacagatccttcctctaaaaaaattgtcggaacctggtacgccgatgccaatcgaaatacaaggtgggtttttactgcagacggaaaagttttcaattacgacaaaaatacttttaaagtgatgtaccgatacactatttcaaacagctgccagaataattcagatgatacactcgaatttgtaacgttgatggataaggacggtgatgaatattgttttagaataaacgctataaatgagaacaagaatggcgttttatcgatgacgaatatgagtaatatggaagcactcttgtttgttaacgacatcaacatcgtaataacaaactaaatttatttcgcattaaacttttattaacaaaaagcaaattggcattcgtttatatttgtaaggcaaaaaagaaaaatagcacaaacaggtatgaaaatcaatgtattaagaatttttgttgtatttgctttctccgtaagcggttatagtcagaatgtaaaactgttaaacatcgatcagctgaacgaaagaattaagaacggcaaagacagtacttatgttgttaatttctgggctacctggtgtgcaccctgcattaaagagctgcctcattttgaaaagttaaaggcggatcataaatcagataaattagcggttttattggtaagtgtggattttaaatctaagttaaactcagctgtagttccgtttgtgaaaagaaaaaacctgaaaaataaagtttttctgttaaacgaaagcaatccgcaggaatatatagaccgcattgataaagactggtcaggaagcattccggcaaccttatttattaaagaagataaaagaaaatttattgaatctgaatttacctatgaacaattattaactgaatataaaaaactgtaaattatgaataagtttattactgctgtgactctgtttttgtttaatctgctgctttctcaggctcagagtacaacccttaaagccggcgaaacggctccggattttaaattgaaaaacgtagacggaaaagaagtttcctttgccagttttccaaaagcaaaaggatacatcgttgtttttacctgtaatacgtgcccttatgcggtagcgtacgagcaaagaataattgaattggacaaaaagttcaaagctcagggttatccggtaattgccattaatccaaatgatcctgaagtttctaaggcggattcttttgataaaatgcaggaattggcaaaagataaaaaatatccgtttccttatttatttgatgccggacaaaaagttaccgatcagtatggggcaaaacgtacaccgcatctttttatcgtttctaaaaccgataaaggaaatgtggtagaatatgtaggagcaattgacagcgatcccgaaggaactaaaaccgaaaaaacaaagtatgctgaagaggtgatcgcagcattaaaaagcaataaaaaacctgccgttacacaaactaaagaaattggctgtacggtaaaaagaaaagcaaaagcttaattttcaatgatttcacactcataaaaaaatatctcagcaatgaggtattttttttatggtatttttaaagtagaagttttttattaaaaacgctatagtatctcctgtttgcccacgccctttcagggctatttgtagcattagtttagttcatagtgcgttgcactatgtttgtgctttagggcttacagccctttttaaccgtttcgagtgtttatattagaatgaaacaattttataaatcagaagtaataaaatgatgcttctatttgcaataaaacgctagaatattaaggagttacgattgttgataaacagaatgatttttaacagtccacaatattctctactgtttctgttttttgttgctcctggagctccagttcggcaataatttgctttttcattgtggtatgcacatagtctttggcttctgcataagatacattatagttgcgtttaatttcctgaagatgaatcggaaaataagcaagcagtttatcataataggcattcagttgtgtattatcgggcatttcaaattttaatttgatttgaaatcttctcagcaaagctgtatctatactgtcgtaataattggttgcacaaatgagtaaactgtctgccggaagataatcaatcaattgaatgatcgtatttaccaggcgtttcatttcggcaacatctttgtcctggctgtcacggcttttaccaatctgatcaaattcatcgagaaataaaactgctttttcacgaattgctttatcaaacaacacttttacatttttagaagtttctccaattttagcatcgattagggtactgagattcacaataacaatgttcttgtttaaagcgtttgcaatggcttttgcggtagtggttttaccacagccggaatgcccgtgcagtagtattttgttgtctactttgagattgtacttttttaattcttcgatgtatttatgttctttgatcgtctgaattaataccgttttattctctgtgctaaaaagtaaatcttccagtgctattttttcggtatcgtttacaataagttcgtgcagattcatttgcgattttatttggtgcaaaattagactttattctgcaatattttcgttccagatttcttttcctaaaaagcggtttccaaaaattgaagttccaattcgtatcagattcgaaccttcggcaatagccagttctaagtcttgtgacattcccattgaaagttgtaaattattgatcccttcaatttcggccgcgtaaatttcatctcttgtttttcgaagtaaacgcaatgacggacgcattttttctttttcgacatccagcaatccaatagtcattagtcctttaatcttaagagtttcgtaacgttttatcttttgaataaatgaaagtacttctgttggaggcagtccgaatttactttcttcaaatgaagtgtttaattgtataaaaacctccagtgttcgtccttctttttgcaattgcttgtctaattcattggccaaacttagtctgtcgagagattgaatacaagtgacgtacttaagaacgtctttgactttattggtttgaagatggccaataaaatggcgttcgatttttaaatcttttagtgccgaatttttatcacggagttcctgcattttgttttcgccaatgagtgtctctccggcattgatcgcaatttgaatgtctgctgcggaaacggttttagtcgccagtaatagtttcacatctgatacatttctgccggaacttttacaggcattctccatgcgttgatgaacctgttttaagttgaaaattatatcttctttcatgaggcaaaagtagcggtaagcagaagtacttaaaagatccagtttttagtataagtaatagtccagattggatgtaaactggaccagattaggactataaatgaaaaaactggattatatagcagatcctgaatcgaagtaattttgtacagacaataaagtcaaatttaaaacaaattaaaatgagtaaatcaattttttatcatgccggctgtccggtttgtattagtgcagaacaggatattttaagtttaattaatcctactgaggttgaagttgtcgatctgggtgtcgataaatcgagaattgcagaagctcaaaaagcaggattgcaatcggttccggctttggtaacgccaaacggaaatgtgcttcatattaattttggtgcttctatagcagatgtaattggatagattcactgtgagaggtgagatgtaaaatgtaaatcgtatgaaaatagcagtgtgggatacctatgtaacccgaaaagacggaacagtaatgcattttgatattctggttgacgaacgtacggttgatgaaaaccagatttttgaatatggcaaaaagtatcttaaaacagtagcacaggaagggcaaccactgacctcaaaggaatgcaaattttgtcatattgacaaggctcctgagactgtggaaagtcagattcttaaacagggattttcgattatcgaaatggagaactgtcattaactgattctttagtttgatataaaaaaggctgaaacaacaacgtttcagccttttttattggtgttcgtaaaaaaaaaaaaaaatgatttaacgcatagaaacatagattttagtcaaataaagaaatcaaaaaagaaatttatttctttcacataagagtctatgcgcattcaaacgaagtgtaacgccttttttatagatacagagcctgtgtttctatgtgttaaatgaattacacccgatacattactattataaactttttaattttttcataaaaaccggaaagacttcattcaattcttcaaatagaggattgttgcggtgctttagttttatttcgctgaacaatttgagaccaagtgcaaattgggtggcttcgtgtggattttcaaacagttttttagcctttattttttcgatgatatcaaatatttcatcatgattgtcgaattctattccaagttcttttgcgggttctgtttcgccgtttgcgtattcttttaagcttaaagtcaggtaatatttgtttgatcttttttgcatggtattattttttaacttctatttcaaccatttgtctacaatggttttaaaggtttctttgtattgttcaccaaccgtgatctcggttttattaatgaatatggagtttttactgatggagtttattttgtccagtgcaactataaaggaacggttgattcgcataaatttttgggaggatagtttttcttcgagtgcttttaaagaaatcaaagacattaacccttttggggaattttcaagatgtactttcacataatctttgaggctttcgatatacaagatgtcttttaatgaaattcgaacccactggtattctactttcagaaaaataaaatcatcatcatctgcggtaatggactgaaattgaccggaggcctcttctgttaattgtaaaactttgctggcagctcttaaaaactcttcataactaaagggttttaaaagataatcaacagcgttgacccgatagccttcaatagcgtaatgattgtaagctgtggtgaaaattattttcggtaatgttccctgctgttcctgtaaaaggcgggcaagttccataccgcttaaattcggcatattgatgtccagaaaaataatatcgggttgttgttcccgtatcagactcatagcttcaatagcattatcacagctttgaaccaactgtagaaaaggagtttgttctataaaagtttccaccaattttaaggctagcggttcgtcgtctactgcgatacattttaatacaatcattgttctaaagttatttgcaggtttactttatattttccgtttggatcaataccggccgttaaactgtggttgtcaggatagataaggtgtaatcggcgtttggtattggttaaaccaattccgccctgttctgttggagctgttttttcgaaaaaagtattttctacttcaaattcaagcagggttccgttttgtttcagcgcaaaatgaatctcgcttttgtctgtagcatgtacaccatgtttaaaggcgttttcgactaaaggcagtaaaagcatcggtacaataggataatcctgaattttttccggaatatcaccagtaatagtcagtttactgttggcacgtagcttcattaaagcaataaagtccttcataaaatctacttctttcaataaagttgttctttcgccttcggtactgtaaagcaggtatcgcatcattcggcttaaagtatgaagcgcattacgggaatcttcaatattggtgtacgtaagggagtaaatgctgttaagcgaattaaagaaaaaatgcggattgatttgtgctttcagcatagccagttcggtcatcgttttgtcctgctccagtttttgtttgtgctgagcggctctttgccaatgcagcaacatggcataactggtactgatggctaaaaccagtaaggtgaggctaaaaatatagttatcgaaataggtatttcggtatcgtttgaatcggataagcgcagccagtttgttatgcaaatcggtgttgaggttgtaaaaataggatgccagctgcatgatgaaaataatcaatagaatccataacaggaaagggccaattttgtctttaatgatggtttttggaacaattaccttggcattatagtaaaaaatcgcaagcatgaaaagtaaaacaatggtttgccaaatccagaatataggaggaagtgctatattccaggtcagcggaatataaaacagctgcatatatcctaataatacccaggccaggatgtgtaatccggtagacataaacggtttaaaaaaatggggtttcattgtaagttgtgattttagggacaatattacattttatttgaacagcatataaaaccaatcgctcaaaatagatttacaacccgtaaaaaccattttagagtcgacgaggctgttacaaaaatacttatttatcagggaacatcttccatcggttctcatctaatctttatcgattgcagggggcttttcgtctattgtaaaaattttgtgtgttctatttcagttcttttgttccttaataaatagataatcatacaatccataaaaatgaacaagcaatcttttttaagtattctagcagcatctattgtgatcacttcgtgtggaaacaaaaatgataaagcggctcaggctggaggtgcaccacaagttaaagaatataaaacgctgactttagaacctaaatcggctactttatatacagattaccctgcgagtattcaggggcagcaaaatatagaaattcgtccgcgggtagaagggtatattgataagatttttgttgatgaaggcgccgtggttagggccggacagccattatttaaaattagtgctccggaatacgagcaggaagttcgcacagctgccgcaagtatcaaaagtgctcaggcaaatttaagtgcggctaaactggcagtcaataaagtaaagccgttggttgaaaaaggaatcatcagtaaatacgatttagaatcggcacaatatacttatgaatcggctttagcaacactggcgcaggccaatgccagtttggtaaatgcgaagacaaacttgggatatacaacagtaaccagtcctgttgacggtgtcgtgggctctattccatttcgtttgggaagtttagtgagttctaataccgcagatcctttaacgacagtttcaagcatcggaaatgtatatgcttattttgcagtgaatgaaaaaaagctcctgaactttactcagaatacagattccggaattgcactggcagaaaaaattaaaaagatgcctgctgtttctctgcttctttcagatggtacagcttacggtgaaaaaggacgtattgaaaccgtaaacggattaatcaataccgagacgggttccgttactttcagagcacgtttccccaatacaaaaagtatcatcagaagcggaaacagtaccacagtgagaattccaaacgaagtgaatcaagcgattattgttcctcaaagcgccactttcgagcttcaggataaattgtttaccgtggtagttggaaaagacgggaaaactaaaaatgctaatattacggttttagaaaatactgcaggaaattattatgtcgtaaaaagcggtttgcagagcggagaccaaattgttctggaaggtgtggcagcgcttaaagacggaacagaaattaaagctcagaatcaaagtgcagaaacggtttacgcggatttaaaataaaaagaaatgtttaaaatattcatacaacgaccggtactatctacggtaatatcggttattatcgtaatcctggggatactgggactggccgcgcttcctattgcgcaatatccggacatcgcaccgccaaccgtgaatgtagcagcaagttacaccggagcgaatgcagatgtggtcctgaaaagtatcgtaattccgcttgaagagcagatcaacggtgtagaaaacatgacctatatgacttctacggcgactaatgatggtaatgcctctataaaaattttctttaaagtaggaaccgatcccgatttagctgcagtaaacgtacaaaacagggtttccagagctaccagtttattgccggttgaggtaactcaggcaggggtaaccgtaaccaaaagtcagagtagtaacttattgattttctctttgtacagtgatgataaagcctacgatcagacatttcttcaaaattatgctaagatcaacttagtaccgcaaattcagcgtgtagtgggagtaggagatgttaccgttttcggttcaagagattattcgatgcgtatctggctgaagcctgatgtaatgcaacagtataaattgattccgagtgatgtttcggctgctttggcagaacaaaatattgaagcggcaccgggaaaatttggtgaaaacggagatcaggcttttcaatatgtaatcaaatacaaagggcgtttaacaagcgcaaaagaatttgaagagattgtcattaaatcagccggaaacggacaattattgcgtttgaaagatgtggcgaaagtagaattgggttctttaagttattcttcgaccagtaccacaaacggacgcccgtctgtaggtattgcgattagtcagactcccggttcgaatgcacgtgatgtcattaataattctaaaaaattgattgacgaagccgtaaaaacgtttccgaaaggcataaagtataccgtattaatcaatgtcaatgaaaacctggatgcttcaattgagaaggtaattcacactttggtagaagcttttattctggtttttattgtagtatttatttttcttcaggattttcgctcgactttaattccggcgattgcagttcctgttgctattgttggaacgttcttcttcctgaatttattcggctttaccattaacctgctgacgctatttgcgatggttttggccattggtattgtggtcgatgatgcgattgtagtcgtcgaggcggtacacgccaaactcgacaatgggtacaaatcggctaagaaagctactattcatgctatgaatgagatttcgggagcgatcatttcgatcacactggtcatggcagcggtatttattccggtaacctttatcacaggttcgaccggggttttctataagcaattcggaattacattggcggttgcgattattttgtcggccgtgaacgcacttactttgagtccggccttgtgtgctttacttttaaaaccacatgctgacgatcacaaacatcaaagttttattcagagattttatacctcatttaacgttgcgttcgacaatgtaaccgaaaaatacaaacgttctgttcagttcctttccatcaaaaaatggatggcactgggatccatacttattgctgcgggagctttgttctatatgatgaaaacgactccgtctgctttcgttccggcggaagatcagggtgtagtttttgccaatatcagtttaccgccttcggcttctatggaacgttctgacgttgtagcgaaaaaggtcgatagtatagcgcacaccattccgggtgtcgaaaatacccttcgtatcgtgggtcagaactttacagcaggtgcgggtagtgcctatagtatggtaattgtgagattgaaaagctgggaagatcgtgagctgagtgtcgatgatgtaattggtcagctgtttgctaaaacgagcggaattcgtgaagccaatatcttctttatttccccgccaacgattcagggatttggacaaagtggtggatttgaatttcagttacaggataaaggaggtcacagtacagcagaattttataaagtaaacaatgaatttctggccaagctttcggcacgtccggagatacaatatgctacgacaccttttaatccgggtttccctcagtacatgatggatattaatctggcaaaagcaaaagatgcaggagtttcagtcaatagtattttatcaaccatgcaaggttattatggtggattgtatgcttccaatttcaataaattcggaaagcaatatcgtgtgatgattcaggcttctccggagtttagaaccaataccgaaggtttgaacaaaatatttgtccgcaacagcgccggaaccatggcgcctattaccgagttcgtaaaaatgaccagggtattcggaccggaatctatctcaagatttaacctgtttacctctatttcaatcacgggagcaccaaaaccgggttatagttccggagatgctattaaagcgattcaggaagtagcagcagagagtcttcctgcaggttatggttatgaattttcgggattaacgcgtgaagaattagcatcaggaagtgagacgatctttatttttgtattgtgtctggtgtttgtttacttcctgctaagtgcacaatacgaaagttatatcctgccttttgctgtactgttctcaattccgtttggattggcaggagcctatttgttctcgattattttcaagttgaacagtaatatttatttacagatttccttaatcatgttaattggattattggccaagaacgggattttgattgtcgaatttgcactcgaaaggcgccgaaaaggattgccaattgtacagtcggctattgaaggagcggtagcacgtttccgtccgattttgatgacctcttttgcttttattttgggacttgttcctttaatgtttgcttcgggtgcaggagctgttggaaataaatccattggaacgggtgctgttggcggaatgttgatcggtaccattttaggagtatttgtaattccggtgttgttcatcatttttcagacattgcaagagcgtgtgagtggtccgccaaaagaaaattatgatgatgaaggtgacgatgaagaggaagtgcaattgatggaaactcacaaagagtagtaatttaatttaaaaaaaatgactcatagttttaataaatatattcttgtggtagtggcagttactctgttgagtgcgtgctcgattaccaagaaatacgaacgtccgtcggctatttcgaccgataagttgtatcgtgatcaaaatgctgccgattcgactactatggcaagtatgccgtggcaaactgtttttaaagatgaaaaactgaatgctttaattcaaaaaggtttagatcagaatctcaatttaaagaatgcgatcgaaaatatagtgcagtcgagagctactttgcgtcaggcaaaattggcttattatccaacgctgaattttgatgcgagtgctacacataacaaacaatcaaaggcgggactgaatttccccccgggaattaatatcaatacattgacaacaacctataagttagggttaagtacttcctgggaacttgatatttggggaaaattgagcagttcaaaaagagcggctttagctgcctatcttgctacagatgctgcaaaacaagccattcagacacaattgatcgctgatattgcgaataattattttttgctgttagcgtatgacaaacaattagaaattaccaaagcgactttagaaagccgtattaaaaatgtggaaacgattaaagcgttaaaagaaggtgcaatagtgaccggagcagcagtggtacaaagtgaagccaatcaacatgcagctgaggtattgattccggatttaaaacgaagtattcgtgaaacggagaatgctcttaatattttgttgggacaagctccgggcgctattgaaagagggacattggggaatcagaccgttccagaaaatctggcagtaggtatgccggcacaattgctggaaaaccgcccggatgttcgtcaggccgagtttaatttccgcactgcgtttgaaagtaccaatatggctaaaacgtatttttatccaagtttaacacttaccgcaagtggcggattctctaacctgcaactaacggatttctttaccaattctgttttttattctttgataggaggcttaacacagcctattttcaatcagggactgaataaggcaagattaacaacagcacaatccaaacaagttcaggcactgaatgattttcaacaaagtcttttggtagcagggcaggaggtatcaaatgctttgtatgcttatgaaatggccgttgaaaaagaagattcaagacaaaaacaaattgaagcccttgaaaaagcggttgatttcacacaacagcttttagagtacagctcggcaaccaattataccgatgtattaacttcagagcaaaatctattggcagcacaattaagcgggattactgataatttacaaaaattacaagcagtagtcgatttgtatcgcgccttaggtggtggatggaaatagtcttcgcggcttctattattttaaattttgaaacgaaaagcgcctcagttgatgaggcgctttttttgtactatttagagtttcgtgagctttctttgaaaaacaaaatcactcttttggttgcgttcccgttataatctcaaaacttcacagcatttttgggaacggtttctccgagggtagttgttttagaaaaatctgtttttggagatgcggtcaactcaatattctggcaagcttctccgttaatggagattgctttcgcagaagtcgaattaaaggttatattttttaaagacatatttttagtattgtagatttcaaatacggtaggattttcgatgtctaatttggcattgttgattttaattccgttcgcatcaataatcgaaaagcctttttctgctttggcaatcaaattggagatttcgatattttccagattcatttcaggcaaaccttgcagaaataccgcttgctgcgcgcccttaatggtgatgtttttaatcgatatgtttttaaactgtggtgtttcttcgtttacaggaacagcttttgtagttacggtgtttccgccttcggccaaagtttcggctatggattttcccccataatacaaatcaaatgaaatggcttgtgatggaatatcggtcataaaaatatccgagatataaatgttttccacaattcctccacgtccacgggtgcttttaaaacgcaaaccaacatccgttcccatgaaagtacaattggagacatgcagatttttcactccgcccgacatttcgcttcccactgttactccgccatgcccgtgataaacgatgttgttttttacgatgatattttcgcaggcaacagctcgatcacgaccgtctttgtcttttcccgatttgatacagatggcatcatcgcccacatcaaaacttgaattttcgataattacatttttgcaggattctacgtcaagaccgtcaccgttttgagagaaccacggattacgaacggttatgtttctaacaattaaatcctctaccataaacggatgaaggttccaggcaggtgagttttgaaataccggaccatcaaataagactcttttactgttttgtatgctcactaaaaccggacgaaggaagtcgtgaatggcttcaaattcttcttttgttttcagatcgtgacgaacattctgatcagcacctttggagccttttaaatattgttcagaaggataccagctgtctttcttgtcatttaaaacgccaccggaagcgataaatttcttccattgttcctccgtcagtttgttttttttaacctgtctccaggcttctccggaaccgtcccacacaccacttcccgtgaaggcaacatttaccagattcttaccataaataggagagatgcatcgccaggtgttaagcccttcaaaactggtttcaataatgggatataaacttttgtcggtagagaatttaattaaggcgcctgtttgggcatgaagttcaatattgctttttagtataatcggacctgttagccagattccgggtggaataattacttttccaccacctttttttgacagggcttctatggcatcagcgaaagctttagtgtttaaaacatagccgccatttacagctccaaaatcttttagatttacagtattatttggtattaacggttcattgacttttggcattctaaattcgatgcctttgtatgtatcataagaatctgaattttgtgcagtaagttcggaacaggtcacaagtaaaaataccactgtaaaaaacaagtgatgaatagatttggttttcataggtatagttttttatggatttttttattgatgttggaatgtaggccagcattaataaaaaaagttaaatgtaatcgattacacaaaactattgaaaaatatttataaatgataatttacttcaaaaataaaataatcattaaataaatttcattgttgaacgtgatcgttttgccacgaatggcatcaattttacaaattctgtttgatttctttttttgctatagaaattgtgcgagtcaatataagtttttttcttaactgaatttatataacatttaagatttaatttttaagcttgttttttgtgaaagaaataatgttattttagctaaagatttgtaatgttaaatagtgcatttaattgtacaaagtataactaaaatataagtgattttatgaataaaacactttgggaaaaggttttagcatttagttttgatcaaccaaatgatcaatatgggttttcaacaagattagcactagagaatcattggacgattcattttactcaaagtgccatagttgaatataaaaagtttctttttctggccgcaaccaataacgaaatggtttcaccttcagaaattgttgatattgtctggcatcaacacttaatttttactaattcttattcagatttctgtgatttattaggaaaaagaatagaacatattccctcaactcataatagatcagaatttgataagtttaaaatggcaaaagaaaggacaaaggagctttatgaagttaattttggtccacagttagctgaaatttggcattatcataatgaattagattctttacatttagagagaagcagctatgaaatttcaaaacttagaaaaaactttttaatctataccatcgctctgtcatttccggtgtgtttggttctcttttcatttttaataaaaattaataatcctaatttccttatagcatatcttttgctttttgttgttgtaattttattcttgaaattttacgtccgaaaaagttttctttcgctatatgatacaattaagtccaattttattttgcagaatcttacggcacttgagatggtgttttttagagaaaacaaactggatgctgtcgttcatggagtggtaaataatttgattataaatcataaaattaagattttaacaaatgatagattagaattaattgatgaaagtttcgttgaaaatcgatatgagaattgtatagtcgagattatgaaagattttgagccaatgtcttataaggaattatgcaagactgcctcgcaaaaacctatttttgagcagcttcagaaagctacctatagaataagaaacagaatttttgattcgaaaaaatttgcgaatgtagtgatccttgtaatgagtattttaggattcttgttaagcattggttttagccgatttataactggggtttggagaggtaagcctattacatttttactttttgcgattgtccctttggttttagtttcgttgtattatatcaatcaggtattgaatttaatgtttacaactattattccttctgtttttgaagataaggcaaggatagtaacagcacatgaaaagaattgggagtgggattattttctttatggaaatgtaatagtagcaagttcattcatgccattgattaattacaatacaaattcagtttcttcaaataattttatcagttcaggatcatgcgggacttcttcatgcgggacttcttcgtgcggaagttcttgcggttcttcgtgtggagggtgcggtggtgactaaaagaaatcattaaaaaaacaaacattccgtcccagaaatctgaaacggaatgttttaattaaaaaaaaaactcaagtaataacaattgttatgagtgcttttactgcttgtgcagctttttagaatactccaatataatggtttcctgctttgtttaccagtttagctcctttagtaacagctcctgttgggatatcgataacgtaaatgtttccgtcttttccaactggtgtaaccgctaagtaaagctcatttccatccactacaaaaccttggtactgaccaaaatctatagctgcgtcataagcaatgccttctacttttttagccgttttagcatttaaatctactcttgcaacaaatccttgttttcctgttgcggtttgtgtgtaaagtacataagcaattccgtttcctgcatatctccaggcatcgatataagatccttttatacctaatgcagcatcaagactaattacaaatgagtcatcatattgattgttttggttgattcttacaatataagaacctctgttggtatctctttgggtagcctgataaatgttaccgtcagttcctaagaaactattgaagctacggaaaccgctcgtatctccaaaaccaacttttgaagaaataatttgtgggttcgctaatgatggataatctactacaacagatttagcacctaaacggtcataggcagtttcgatttgtcctgtagccggattcgttttacgcaaccatgtcccgataattattttgtttcccgctttgttgatcgtaggagcatctaaacggaaaatatggtgtcccaaagcttcttcctgagggcttaatggaagttcatactgatcgtattttgaaatacgaatacctttaaggtctaaagcaagaacagtagcagtacctcttgtatacatatacgttttgtccggatttgttttaattacgggagaagttacatttacagctacaccggttttgtctccgtcaaaaagtttattccatcttggagatgttcctgcatattgagaaatgtttacggttgtacctgattgtgtaaagtttttagctccatttacggtataggtcataaattctccaccattagctccggtataagtaatgttgaaaagcgtttttccgtctacagaagattgcaaacgagctgttctgttggattgtaccggcataccatctgcataaacattaatcgaatagtttggatctttggcgtttttcttagttacggcataaaccatagttcccccgtttccgtctcctggattttcctgcattaatgctcccgaaaccgtaatccagcgatcagttgtttcaggatttattggatctgcagttttctcatcattgctactacagcttgtagtcaatgaaaatacacctaaaactagaccagatgtaaatagtttaaacatattttttctcatattcattgtattaaaaaattagatattaaaagttattaagggtataattcagttttagataaaaagcacgtccgggtttttgaacagcgtaattatcgaaaacttgtttatcaaaaatgttcttggcatcaatacttaccacaaattgtttgttcggaaaaacataactcaaacctaaatcctgtgcaaattgggctggtgttttggaatccggtacgtcaatccaaattgttggaaaaggatctacataaccaaagttgtagtacaaattcaactgtgatttcttttgaatcagttcattaaagttgtactgaacgtttccgtttacggtaaagaaaggttcattagggatttgtctgttgtaaaaatccagctccttcccattatcatcgtatttctttttgtataaggagttgaatcttgacaggttcatcgatacaaacaaacggtcgttatagctataattaaaggatgcttcatagccaatggattgcgcacgtcccagattgtcaaacggtaaaacctgtatggcatcattcactctgtcattggagacacgaacaattcgatctcgggtatttcttgaaaaacctgttgcagcaaccgaaattttgtgcgtatttatggcgtaagggccaaattgtaatcctaaattgaaattgttactttgctccggttttagattggggttagccagtacattttcactgggtcttccaaatatttcagttgcacctggtaatctgatggctttttctgctgatgccgtaatcataagttcaggagtaacaaagtaggaagcggccagcccgtatccaaatagcggagttgtacttttactaatcttttccactaccgtggtttgcccgttttgtgtgaccaattccggttttctgtggtttactttttgttcgtaaaacttaccgaaaatattggttctcagacgggagtcaaaagcctgcatttcgtaggctagggaagtaaccgttttttgtaaatcagatgtggcttcaaaatctctttgaaattccggtttgattaaatcgtcttcatttctatccagtgtatagaataaattgctgaatataaatctgtttttttcatttagattataagtcaatacggttctggagctaagtacattctctgagatggtattgattgttggtgcaccttgttgtgcccccgtataagataaaaggggtttgcctgtccttaaatctattactctttcaccaaaccagttgtaagtccatctgacagtatcatttacgatttgatgtttaccgctgtagaccgtgttggttgaaaaatccagttttttaaataggaaatcttttttagagtagttcagacttaaaacagtcgcatcagcttcggagaaacgacctttataaggttttgtcatgtattgaccgtgctgaatttgattgtgatcttcagagacatttaacccaattagaaaattgtcggcccatttgacattggtaaaaccggcttcaaatcttcctccgtaggatctgtatcggttttcgaaacgtttaacccgcaccgcttcacgagttccgtccggtgctatattgtaaataaatcttccccatacttcataatcgttatcagaataattataaaaaccggatccttttaccgtaaaacctgattttgcgcgataggttgtattaaagttagactgaatagtattgaaagaaccataagaagcagaggcattcagtgtatttttggcacctttttttagaatcacatttatagctccacccaaggcatcatcagcgagttctgcaggagtgactcctttgtacacttcgatgcgctcgattaaggccgggggtatactgttaagactaaaggaggagccgtaggtatctaatggaattccgtcaataaaaattcggatggcatttccggacattccgttcagattgtaatttacgcttgaacctaatccaccgttttgtcggattcgtacacccgcagagcggtcaagtaattcattggtttgcagatttcgagtggcagcgtctttagtttctatcacattgacagagaaacctttggtcataatttctctttttaccgatgtcttttttacaacaacctcttttaaggcttttggatcatttgatttttccaatgagatatttacctgagcagtaggactgtttaaagttacctttactgttttagttttcgcttcaagtgatgtaatttcgagaatgtatgtaccgtaagcaacatttttaatttcaaattgaccattgttaccaactaaggcaaatttttgagttccggcaattgtaactgaggcaccaaatgcagattcagaattttcaaaagtaacttttcctttaatattcccattttgggaccaaactgaaaaatgaacgaataccaacaataacaataaaaacctcatgatttatgtacttcttaaatagaaatgcaaagctaaatcattgtttatatttaatctaaataaaggaattagaagatcattagaattacattagaaattctaatgttgggatagatttagatttagaagtctaagaatcggatgtgttttgtactattatacttttaaattaccaaggtcgaaattaagaatagttcactgaaaggtttggtgttctgtgtttgtggttgataaacagttgtttgtgttgtgctgcaatagtacataataatttcttaattttgaaatgaattattgccaaaataaggtcagtttttgaaatggcttttgtttgttttataatcgtttgtctctaatttcttctaattatgctttcttttcaaaccaaccatcaggaatttattccggccgaagaattacaaaaaagcgtaaagtgcttttggtatgataagattgattacgggagagtaccatcgaattttgaagtgataccggatggttatgctgaaattattttttattttggaaatgagcttcgtatttcttctaatggagttatgaaaccactgacatcaccatttatgattgggttactccatcagccggctgttttcaattcggtcaattcgcttgaaattatcggtattaggtgttatccgtggatggtttttgatctgcttgaattgtcttcccaaaagggtaaggtgggagtacaggcttttgagcatcctattgctaaacttcagtctgttttgaacgatctgatcgcttcacacaaaattgaagaggcaattgctaaagtcgaagactattttttgacagtagaagtaaaatctggcactaacactttgttatctaaagcaggtgccgccatgacagtggctggaggaagtatgtcggttggtgaggttgctgcggtttctcatgttacaatacgtactttagaaagaaattttaagcaatcggcaggttatacggttaaaaatgtttcggctgtcatgcgctttgaacaggctcgcaaccgattatggttcgagcccaatctaagtattgccagtttagcgcaggaattaggttatacggatcagtctcacttgagcagagaatttaaacgttacagtggtaccacaccgggtgcatttgcacgaaaagcaaagcaacagatggtaaattatgattttgtcgcatttatacaatcctaaaataaccggatagcagaattttgtcattcttaatttagaagataaaatgatgttattaaaagatcaaaaagtagccattattggtgcaggaccagttggtcttactatggcaaaattactacagcaaaacggagtcgatgttaccgtttatgaaagagatttaaatgcccaaaccagaatttcaggtggaacacttgatcttcacaaaggttcggggcaagaagctttaaaacaagcaggtttattagagggttatttggataaggcactacccatgggaagaacagtagcagatccccggggaaatgtattattttctaaaacaataaccgaagaagaacgttatgataatcccgaaatcaacaggaacgatttaagattgttattgcttaatagtttgaaaattgatactgtagtctgggacagcaagtttaccaatcttaaagccgacagcggaaaatggtttttggaatttgaaaacgggacaaatgcgattgccgattttgttattggagctaatggaggaatgtctaaagccagaaaatttatcacacccgctacaatcgaatataccggaacattgatgatacaaggcgaggtgctttgtccggaaacatcctgcaggaagtttaataaatggtgtaacggcactatacttatgacttctggaaaagaaggcttgttggttgcgaatccaaagaatggaaaagtattgagttataatatcattttcaaaagtccgaaggagtttatcaggaaagatggtacttttgagagtaccgatggtattcgaaagtacctcttaaatcggttttctgaatgggatgaatgttatatagaattgcttgaagctacttcttcttttgttttatggccaacaaggaagatcagtttagatgatcagtggaaaaaagagcgtccgctgccgatcacactcataggagatgcggcgcatattatgcctccatttgcgggccagggagccaatattggattattagatgctttaattttatcgaataatctgaccaatggagaatttgaaacgatagaggaagcaatcagcgattacgaacaaaagatgtttgtttatgccacacaagcacaactcgagacggcaactaacgaaatagcaatgctaagtcctgatttttctttcctgaaattttacaggtaattttctggttttatttttataaagtgtcgtgtaataaatagccacgaattcacgaattttttctaatttgtattcttaaaaaatttgtgaattcgtggctattttttttaaggttatagattaaaagaaagaaatctgaaattattaaaaaaatgcttcaatattagcgctttgaagggataaaaatctgcattatatgctaacccgagcgatagcgaactggcgaagcaatctgcgtgaaataaaaccctcgcagaggcgcaaaagcgcaaggttttagattggagtatttgaagacttcgtacagaaacagcttagcgtcttcgcgactttgcgagaaataaaaatctgcgtgaaataaaactctcgcagaggcgcaaaagcgcaaagttttgcattggagtatttgatgtctttaaagagaaagatcttagcgtcttcgtgactttgcgagaaacaaaaatctgcgtaaaaaaatacactcgcagagtatcttcaacagattacagtttagccttgaatttcttgattttgaagtttgctgatttgactaattttccgttgtcggtgatcatgacacagctatagtcgggatatttttttaaaagaagaagtcccgctttttgtcccaatatcataagcgaagtacttaacccatttgcagtttcagcgtttggaccaaaaacagaaacactacacaaacccgtaacaggatatccggttgcggtgttgatgatatgagaataacgcttgccgttgaaaacaacaaatttttcataacttccggaggtggtcacagcaccattgtttaacggaacaacggcaaacaaagcatcgggatgaaaaggattcgtcatgccaatgttccagtcttttccgttgggctgtcttccccaggcagtcatatctcctgaaccgtttacaattccggctttgataccttttgcaagcattatatttcggcatttatcggttgcgtaaccctctcccaaagcgccaaatccaattttcattcctttgagttttaggaatacggtcgattgaacgctgtcgaggataatatttttgtaacctactttttctaccgattttttaatagcctcggcagaaggcatttctgtcattgatccgtcaaatttccagattcgatccattgcggcaaaactgatatcgaaaccgcctttggtagcttcagaaaattgtaatgctctttgggtaagttcaaaaacttcacgatctacctttacgggacggattcccgcattttgattgacctcagagacttgtgaatcagatttccagtcggagatcaggttttctattcgtgtaatttcagcaattacaatatcgatattttgttctgcggtaagggagtcttttgcaacgatcgaaatgtcaaaacgtcctcccatgagtagtgtagttctttttcgtaaaacttgtgcattactggtcagaccacctagtattagcagtaaaaacaagtaaggagtaagaattgattttttgattgacattgaaatttattttacattttaaacgaaaatcaggtgcaataattcattagtaacaatcgctcaaaagctgaccgtttttcttgtattcagaaagattcttgacatttctttcgagacacaattgatcgagaattgcttcgacatcctgctgcatggcaagtgaaccgcaaatcataataacaccgcctttttgcaataagtggataaagaaatcagcatcacgtttgatgagatccatcacataaaaatgctcgttttcgcgggacagagccagatgaaaactatgcagtttttgtttctgaatcatttcggtagtaaactttttataacccgaaaccgtttccgtttccatacggaatcctgaatataaatgtatttctgtcttggctttattttgctcaatcattccaagaaaaggagcaatacccgttccgtttgaaataaaggcagcctgaggtatttttttaggaaaatggaacgctttattgttgatgattctggcttttatcacatttccgggtgccagagcgtttagaaaacctgagcctaatccgtgtggatgtagtttaactactaattgtatgtttccggaatgacttccgatggagtagagacgttccctgctgtcgttagccggataaatagccaataagtcaccagaagtaaatttagccctcatgttggcgcgcaaggtgatcaggaaagtctgctcggtttcggaaataagcgttttgtccagaaccattaatttttgcagtcctttcggaacatgattgtaaagcgaaggagttgtcgacaatgaaatttccatcttagcactccacagtctgatccagttcacaaattcaactgccgatttatcatttatcgtctgaacatctaataaacgttccgcccaattttgattttctaactgtttgtcaatttcgaaagcaaaaccgcaaaaatcaggataggaatttgaaccgaatcctactacagaataagtgattttttgctgttgcgagtatttctttaaaagggatataaatttatttccattcgaaggcgcatctcccaatccgtgggtagaggagaagacaatcagatgttctgcttttggaaaagcagtgtagctgttcaattcggtaataaatgcttttttgccctgatcgatcaattgtttgagaacagcattggcaaatcgtaaagaacttccattttctgaaccgacaagcaatataaattcactttcattggctttgaatttatttttgattcggctagaccttctttttaaggtaattgcaaaacccgaatagataaaaaagaggatgttaatgctggcaatagcaagtacaaaagcccaaattccgttggctcttccggtatgaagatcaaggcttaagtctgaaaactgggctgtcattggagaaagtttttttccaacaatagcaccggttacctgattgacttcaatttcacggtcttttaactctatgatataatattcttccggatcatctgtaaaaggaaattcaatttgtttgacgtccgccaaaagagtatgtttgaaaacagaagtttctttttcttctttggaaataacagctttgaccactttgactttttcctgatcttttttatccatgaagaaattgaatttttccagagataaatacgttcccgtaagtgcaataatcaaaatcggaattagtgccagtcttcccagaataacatggtagtattgtgcgaaatattctttaactactttagagaaaaaattacgaatgcctctttgtcggtttaaaaccaatgcaaaacccgaaattgcaattaaaacgagtaaaaaggaaataacaccaacaaaaaatcgtcccgtttcatgaagaaacaaagaacgatggaatcctgtaacccattgaataaattcactttttttcaggggtgttcctaattttttaccggttttaggatcaatataagcgttaacgtcattgccctcttcatcaatagcctgtagggttacaaattgattgtgatcgatacttatggtagtgatttcagaataattctttttgagtacggtaagagcttcttccaatgtgatcttatcaaaattctcagcccggtacggaagtgttttttcctgcatcgcatcaacagccagtatagtacctgttgccgaagcgaggattaaaaatagagaagagaataaagcaagagccaggtgcgcgtaacgccaaaaagaaagagtcattgaatgtaatctataatgtaatcaaatgtaagcgtttttttcgccacagattaaaaggatttgattttgttgaaactttgtagaatctgtggctgttctttttaaagaaattaatttaatagtgaaccgtacgattactacaattaaattttgtttaatctcacatatctgatataaccttttccttctgtcttgtctgccaatccttgagtagtaagtggaatttctaaatcacttacgtaatatttctgatcttctacagccgattcaaatcttagtttatatcctttatttattttagaatcttctatttcaatggtggtgatacttcggtctccacctgtaacagaagctcctgtttttgcactgatatcagcaggttttgaagtttgaaatttattccattctttcaatgatttgtaccattttttgtcgtcacccattacgtaaagtgttttctcgtattctccttttggattgataagtgaaacaacgatgtaagcaccttctcccatataattagccatttgaagcatacatttgtatttgctttgtgctgcagactgaaaagagatcaagcagattaatgctgctgtaagggctattttaaatattgatttcattttttttagattattagatctttagattgttagattgttggattatcaggtttttgaaacatgaaacatgaaacatgaaacttgaaacatgaaacttgaaacatgaaacttgaaacttgaaacatacagtttttagctgttactttaaaaagtcaatagaaacattgtttttggttaacgattcgttttcttttgctaaagcataagcactttcgtcaaattccgtgttgatgtcttttttagcaccaatggataaaagatactttaagatagagtcgtctttggcaaccatagctgctttgtgtaaagcggttaatccatccttgtttttagcattaacgtcaatgtttaaaggagctaatttttttaccagagtcaggtcatttttagcaatggcagaatggtacagtgaacttccgtctttttgtacagctgctaagtttagtcctttttcctgaagtaattttatttttgcttcgaatggatcttgagcagcattggcttcacggcccatcggacggtaagattgtaccaaatatactcccaaattgtttccgtctttgtctttttcatttacatcagcacctttgctcaataaagtagcaactgcttccggtgctcctgatcttacggcgaaagtcaatgccgattcacctttggcgttttgcagattgatgtttttggtaaccggtaataatttatctaatgcagcagtttctcttgctcctgcagcaatcattaatggtgtatttccgtctttgtcgattttgttagcatcaacacctttggctaaaaagtaagcaatgatctctccctggttgggtttatttgccaataagtgaagtacattttctccggacttactggtcgcaatagcttttaattttacttcttccactaaatatttgtaagtttcaagagtattggtttctctacgtgaaccttgtgctgcgattagaagcgcattgtcagttggttttacttttcggtctaaaagtttttttagaagagtaatatttcctgttcttgctgcataatcgaaagcagtacttccgttagcatcaacatcctttaaagacaatccttttgatactaaataatccgtcaaaacaaggtctttgtcagaggctacagccattagtaacaaattggcaccatcggcatattttttctttggatcaattccggctttgaaaaaagcatcgtacaaagcagtattggtttgaccgtttgaagcagcaaaagcgattggagtagtaccgtggctgtcttccagattaatgtcagaaccttttgcaataaggtaattaaccagttcaagatttcctcggtaagctgcccaatgcaggtaaatacgattgtcgtgagttaatttagccgtggtattaccgggctggtccaataagaattttatagaagcgataggagcatcattgttaatcgcaacaacagtcgcatcaaaagcattagcattgggtactgtcggactatttccttttgcaatttcagctttaacggcatttacatccggtgctgttttccaaaaagactgttctaataatatgtttttttgctgagcactaacaaaaaaagaagcggctaatgcaaaagagagaaagaaattctttttcatattgtaagatttactatttttttaaaatgagttagttttggtacactactgaaatagcttgagaaacacaatctatttagaatagttaaaaataacgcaaatgtaaaaattaatattagtaaatcaatgtatttgctgaagaaactccaattttaatctttttttaaggattaaagaccgaaatgttcagaaaagtaaaagccacagtttgcagtctcagtttgcagtctcagtttgcggtctcagtttacagtctcagtttacagtctcagtttgcagtctcagtttgcagtctcagtttacagtctcagtttacagtctcagtttgcagtctcagtttgcagtctcagtttgcggtctcagtttgcagtctcagtttacattttaccggttttgttaggtgattattgttttcctttttttccttcgatgtttggcaagaaactggtcagaacaccaattaaaggtaagaaagcacaaattttaaagacatattcgatgctggtagtgtcggcaagttttcccagtacggcagaccctaatcctcccataccaaaggctaaaccaaagaaaagaccggcaattaaacctacttttccgggaactaattcagtagcgtaaaccaaaattgctgagaaggcagaggatatgatcaatccaataattaccgataaaattccggtccagaaaagcgaaacgtaaggtaataatagtgtaaacggagcaacgcctaaaatagaaacccaaataatatactttcgtccaaaacgatcgcctaatgcaccaccaaacaacgttccggctgctactgcacccagaaaagcgaaaagataaatctgtgattcctgaactgataaatgaaacttatcaatcagataaaatgtataataactggtcatactggccatgtagaagtattttgaaaagatcagaaccagtaaaattcccaaagaaattattacttttcgcttagaaagggagtggtgtctttcttcagaaatagccgatttgttttttgccttcagattcaaatgttcctgataccatctggcaatacctgaaagtattacaatgccaacaatagcggccaagcagaaccatataatgttaaactgtccgtaaggaacaacaattatcgctgctaataatggtccgatagcacttccggcatttcctcccagttgaaaaatagattgggccagacctctttttcctcctgaagccagatgggcaacccttgacgattcggggtgaaatatagacgaaccaataccaattaaacttaccgcaagtaaaatattgacaaagctggaagcgaccgcaactgccgcaagacccactagggtaaagcccatacctattgccagcgaatacggacgaggctttttatcggtataaaaaccaatgaaaggctgtaggattgaggctgttagttgataggtcagggtaataagtccgacttcagtaaaactcaaactaaatttagtttttaaaatggggtaaacggccggaattacagcttgcaacatatcattaatgaaatgcgtaaaactgatcgtgaacaaaatggagaaaacggtttgctgcgctaattgcttagagtctgttagggtattggtaaaagtagtttctgttttcataagtaataatagatcagatcatctgatgaatatgggtaaaaattagtaattgatatgtcctataatttttgcgacagtattccaggcttttttaggatcctgtgcaataatattttctaatagttgttggtgtacggctgatgtttcctggaatattttcgtatccccataaagatgcaggaatccttttttaagatgtacggaagcagatttgtaaagatcagccagaatttcattttttgaagcttttgcaatcgcaatatgaaattgtatatcagcttctacacattcttccagatttccttctttggcagcgatcattctgttgagtaaatgctctttcattgctgcgatatcgtcatcagttctgttgattgccgctttttcagcaattttcatttcgagtatttgtcgaacttcgtccaggtcctgaacattggcgcgcatgatacgctgatccattggttcgcgtgtactggttaatcgctctacaaaagtacctacaccttgttgtatacgtaaaaaacctgagttagcaagcaatttcatcgcctcacgtatagacgaacgacccacaccaaaacttttcatcaactcagcttcaatgggtagtttttcattaattttataatgacccaaggtgatttgctcctgtattttggaggcaacttcttctgcaagtgattttttttggattagtgttttcatgcgtagtattcacatcatctgatgatcgcaaaaataaaagaataattgtagaatcaaccattattaagtcttttttatgatttaattggtgagctgctgatagggaattggggcggttttatgggttgttggttgcttttcagtttgttatgtttggatgtggtttcgttttaatttgaatctcttaacaataaaattgtataacttttcgggtgaattatataaagtttttcaatttaaattacagaaatttgatgttgatacccaaatatcattttttaactaaatctactatatatgaaaaatctaaaacacattgtgcttctttcgggcgtattctttacttttctgagctgttcaaatgacaaagaaacgccatctaatcccggtacgattacaaatcctgtagaaggtaatcctgcgaatacggcttacaaacctgcttttatagggcaaactcgtaccaatggtgtacagaccaatacggcatttgaagctaaggttattacaagtgcgcttacaagcccttggggagttaaaagtcttccggatggccgtttgttagttacacaaaaaggaggtactatgcgcattgttacaactgcgggagtgataagtgacccaattaccggtattcctgctgtaaatgcaggagggcagggtggcttgttgggcttatgtctggatcctgagtttgcatcaaacagaatgatttattgggtattttcagaagctactggtggaggaaataacacggcagtggccaagggaaaattatcggctaatgagaaaacaatagaaggagcgacgattatctacagagcaaagcctgccaatgccagcacccttcattatggaggacgtattttgtttgataagacaggtaatttggtagttagcaccggagaacgttcggttttagaaacaagacctttggcacaatcgattacatcaggtcttggtaaggtggtaagaattacaaaagaaggtcagccggcatcaggaaatccaacttttagtcaggcaggagcattgcctgaattgtatacttacggacacagaaatcctcagggattggcgcttcacccggttagcggtgaagtttggctttcggaacatggaccacgaggaggtgatgaaatcaatcgcttaaaggctggtgcaaattacggatggccgactattacttacggaattgaatacagcggagaaaaaataggcgcaggaattcagcagcaggacggtatggaacagccggtttattactgggatccggtagtttcgccaagcggtatgacgttttacagcggtaatcgcgttccggaatggcagaacaatctttttattggggctttaagcggaatgcatatcgtgcgtcttgctatagagaataataaagttgtgggtgaagagaggcttttggtgtcagagaatcaacggttcagagatattactcaaggaaatgacggggctttatatgcggttacggatggtggcaggttgtataagattgataaaaagtaacttttgagttttgaatattaggaataaaaaatggtgctgagaggcgccattttttgttggtataaaagtattttttttagatttttagattgttagattgttagattgttggattttagattagcgattacagatttttaatttttgacttttaatttttaatttaagattgttgatgacattgtccgtttgatagtaatggttttaagacgcgcaacacgcttttagtctattattttgataggttaataaaagttttactcgtttttgtcttgaaattaaaaataactcattaaatttgccgcatcaatgagaaaaaagaaccataatacaagctattgtaacagcaacatgatgatgtgctgtggccctgttatgaggttaattgatctggcttacctataaaataatagtatttatttaagaagcctttcatgattttttgagaggcttttttgtttttaaacttgaattacggaatgattgaattaaaaaatgtcactaagaatttccatcagaaggatcgaatagtttctgccttatcggatgtatcacttagggttccacccgggaaaatttttggtgtaataggaacatcgggagcaggaaaaagcaccttaattcgatgtgtgaatttgttggaaagacccacttcgggagaaattattgtagacggaaaagcattaatgcaattgtctaatgcccaactggcggtagagagaagacagattggaatgatttttcagcattttaacttgctttcgtctcgtacagtttttgaaaatgttgcctttcctctggagcttgtgggagcttctaaagctgaaatcaaaagtcgtgttttagaattattggaattggtaggtttgaaagaaaaggcaagtgattatccggcaagtctttcgggcggtcaaaaacaaagggttgccattgcacgtacgctggccaataatcccaaagtacttttatgtgatgaggctacaagtgcactggatcctgcgactacaagatcgattttaaatttactgaaagacattaaccgtcgtttgaacattaccgttcttctaattacgcaccaaatggaagtcgtgaaatcgatctgtgatgaagtagcggtaatcagtcacggaaaattaatagagcagggaagtgttggagaaatttttgctgatccgaaacacgaactgaccaaagaatttattgcttcgtctttgcatcttgatgttccacagatctatcaggaaaggctgcgaaaggaagatggtgaaggactgaacccgctcttgagacttgaaatgacgggtaaatcggttaacgagcctgttatttcggaggtttcgcgtttgtttgataccaattttaagattgtaagcgcgcaaatggatcaggcaggagaagttaattttggtgtgatgctgatcgaattgtcaggtaaacgtgaaaattatgatgctgcaatccagtattttatttcaaaacatattaaaacagaaatcataggttatgtctgaatccattattgaattattattaaaaggtacttgggaaaccatagtgatgacttttgtctctggtttttttggttttctgcttggactaccaacaggtgttttgctttttctgacccgaaaaaatcaaattttagaacagccggttttgaatcggtttttatcggttttggtgaacgtttttcgttcgattccgtttatcatcttaattgtatggatgattccatttacacgagcgctggtaggaacttctattggtgtaagtgcagcattagtcccgttaagtattggggcagctccttttattgcaagattggtagagaatagtcttttgggacttccgtcagggctaatcgaggcagcaagggcattgggggcaacacctttgcaaatcgtatttaaagtgttgcttccggaagctttaccatctttaatcaatgccgcttccattactttaatcacacttgtgggatattctgctatgggtggagcagttggagcaggtggtttaggacaggtggggtatcagtacggctatatcggttatgatgctgtaacgatgaactcggtattggctttactggttgttctggtattcctgattcagtttgcaggtgatgcattgtctaaacgatttgatcatagataacgtttaattgagagtaaagaagaaagagttaaaattataaatagtagaaggatgaataataaactaaattttttaaaatttgcaggaattgtggcactgtcaattgtggtgtccaattgcggaaaaagtaaaagtaacgatccgcaccatattaaagttggtgttgctgccggtccggaatatgtggtggctcaggcagctcaaaaagtggccaaagacaaatacggtcttgaagtagaattggtttcttttaacgattatgtgattccaaacgaagcgttgagtcaaggtgatattgatgtgaatgcttttcaacacaaaccttatttagacgagcaatcgaagcagcgcggatacaaactggcgattattgccaaaacctttatttatccaattgccgcttattctaaaaagatcaaaaacctttcggaattgaaaaacgaaagcacaatcattattccaaatgacccgacaaacggagggcgttctttgttgcttttagagaaaaaaggtttactgaaacttcgcccaaatgttggtttattacctaaagtaacggatatcgtggaaaatcctaagaatcttaaaatattagaattagaagcgccgcaattgccacgtgctttagacgatcagaatgttgcaattgcgattatcaataatacttttgcttcgcaggcaggactggttccggctcgtgatgccctgtttgtagaggacaaagattcgccttacgttaacttaatcgtgagccgtgatgacaacaaaaaagaagaaaaaataaaacagtttgtagcagcttttcagtcagcagaagtagaacaagctgcggttcgtgaatttaaaggcggagcggtaaagggctggtaaaagtttttctagaaatattaagtaggtcggataatttttttttaatctggtaaaaccttgcagttttataatgcgcaatgattttttaatcgttgcgcattttttttggctaaaatcgacgtggtgaaatctgtttttccattgctttaagattttgggtttgtttagtaggcttttttgtaatactaccaagtgttacataattaagcttatttatttcattaatgcttccagttgttgattttgtttgtgtttgattattttattgttttaattttaattaaggaattaacaagaataaagatactttttgaggtatagaaattaactgtttgatttgatccagccatttaattaaccacaagattaaaacgaaaagccttatgaaaaaatgctatctgttacctatgttaattttatccttctttgcctattctcaggacattctctgggaaaaatcatacggagggcagcatgccgattatttgtttgacgcgcagcccacagccgattatggttttgtcctggcaggtagttccttatctaacaagaccggaaataaagacgatgataatcatggggatctggattactggatctggaaaatgggtgaaaaaggagaactggtctggcaaaaaagcattggcggaagcggctgtgatttgcttcagagcattaaaaacaccagagacggcggtttcattctggctgggacttctgactcaggagtaggctttcaaaagaaagatagttgcaaaggcattactgatttttgggtcatcaaattagatgcatcgggtagtgaacaatggcaaagaactattggaggtacagggaaggatgaactcttatgtgcttttcaaaccaaagacggaggttatatgttaggaggttcatccagttccgattattcaggtaatggacttaccggaacaaacggaatttctaagcccaccacaaaagcggctcagtttaataaattagagaaatgccgtggcaatatggattactggattgttaaactggaccaacagggcgatgtcgaatggcaaaagacctatggaggaagttatagcgatgtgctgaggagtatggaacaaaccacagacaacggatacatactggcaggttattccaattcgcccgtttcaggcgataaaactgaaaacaacaaaggaataggagattactggattcttaaaataaatgataccggtgaaattcaatggcaaaagacctatggagccgaaggagacgatcagccttatgtcattcatcagactgccgatggcggttatattgcgggcggaaactccaacagcaaaaatgctttgaccacactgggcggcatagtaggcaacgggaccgattactggatcctgaaactcgataaagacggaggtgtggtatggagtaaaacctatgattttggaaaaacagacatcctgacctcattggtagaaaaccaagatcaaagttatctcataggcggttatgcgcaaagcgaaagcaggcgtccgcgtgaagggatcgtagccaaagcacttaacgctgtcagtaaagaaaaagaaggtattaacgactatatcgcgatgaaaatagacgataaaggcgaagaaatctggaacaaaaccgtaggcagtgccggcgaagatatcctcaggaagttaatcgaaacccgggacggaggttatctgatggcaggaacttctaattcggcagcctcaagagataaaaacggcagtatgggaggtaatgatttttgggtagtaaagctcaaagacaaaaccaaagtagaaaaggtaaaatccagtaccgaagtcattccgaatcctgcagctacctataccaacatcatcatcggttatgattttaaagaaggtaccgccactttgatcgatatcgccggacgtactttgcaggaattcgacatcaacagcaggaccgttcccgttaatctaagccagtaccctgagggaatctacatcatcaaagtcagaacagatgtgaaaacagaatctgtaaaagtgattaaaagtggacgataaattaaataatcaaaaaaatcaataagatatgcaaatgaaaaaatccttcattccttttttgattttcgttttattattaagtatttcgaaaacagtagcgcaaaatgatgctgatagacaaccacaaattacacctccatatcctgcaactgctgatttagggaattatggtaatgttcctgttggactttttacaggttcaccttcagtaaatttagaattatatacacttaaagaaggtggaaatacaattcctctgtcgatgtcttataattcaaatggcgttcaggtagatgcaattcccagacagcttggtatagattggaatttaatagctactggagtaattactagaagtgtagtggatcagccggatgatgaaatagctttttataatgttaatgcctcattgattgattgcattccaaatgataccgctaggaatatagcgggagcaaatcaggttgatacggagaaagatgtttttagtctgaatgcatttgggttgtctgtcaaatttatatttgcagatgatagaagaaatacaatccaaattgaacagagtaaaattaaaattgtttacgaaggtggtttttttactgtcatagacgttgatggaactgtctatacttttggaggaacgaatgctgttgaagagtcactcagcagaaatgaaggagtttcaggccctgttcccccagtacaatataacaccgcctggtatcttactaaaattcaaaagccaggtggagtatcaccagtagttttttcttattctcaagaatggatgagattttacagctcttattttcaaaaagcagtatcaactcaacagaatatacgtagtacaggttatatgagtggtatttcccaaccaagaactcagacgtataagaacaaacaatatcataaaacatcattattaaaagagataaaaattaataataagaaaataatttttgattatgattataaaaatccgcctgcggaatttcagagccataattcaaaacaactgatttctattaaggtttataatgacactatcaatttagcaaattctctaattaaaaaaatcgattttaattacgatcaaataacaccatccaatattggtgctaatgggtataccaatgtaaattgtattatttcagttagttaaaagtttttttaagcaatgatctgattttacttttttatatttggcatttgctgaaataaaaatggtaagaactaaaaatgtagctgaataagtacataaaattcagaaataatatttagcttagccaaacattagaaaaagattaaatattggattaacgtatttaatgtttaaaagaataaagagaataataaaaaaatatagaacagtatgtctggattattagctgttataggtaaaggtaaagacccgcaactcgtaaaagaactttctgcaagaatgtcgcatcgtggtcctgatgaaagtgatttgcatattatggaaaatggcagtatcatttgccatgaaagtttgtcgattattgatttaaaatcaggtaagcagcctattcagggaactaacaaggcctggatggtgcatgatggagagatttacaactatcaggaactaaaagacacagtcttaaaagggcataccttcagaacaaaatcagattcagaagttatcgtgcatttgtacgaagaacttgggcataagttttgtcatatgctggatggtgattttgcttttgtaattgttgatggagataattatatagcagccagagatgcagttggtgtaaaaccgttgtattatggactggatgagagagggagaatttatttctcatcagaaatgaagtccatttcagatcagtgcaaatccttttcaacttttcctccggggcactattatacagggaaaaccggttttgtaaaatactacaatcccgaatatgaagaccactccaaagccaatcaaaaattagatttagatttaattcggaatactttaattgaagcaacccgtaaacgtttaatgagcgaagttcctgtgggagtattactttcaggaggattagattcttcattaacgtcagcgattgctgcgcgattattgaaagaaaacggagaaaaactgcattcgttttctatcggattagatgctgatgcacctgataataaagcggcaagatctgcggcagcatttttagggacggaacatcacgaaatctattttacagttgaagaaggaattgaggttttagaaaaagtaatttatcatattgaaacttatgatattatctcggtacgatctggagtgccattgtatttgttgtcaaaggtaattgctgataaaggaattaaagtaattctttccggtgaaggtgccgatgaggtttttggaggtcatttgtattttagaaatgcaccatcagcagaggaatttcaggatgaaactatcgaaagagtacaaaaattgtttactgctgatttactgcgtgccgataaaataccaatggcacatggactagaagcgagaattccgtttttggacaaagaatttttagaagcgtcaatccgaatcaaaaccatagaaaaacaacccaaaacatacgatggaattgaaaaatacattttgagaaaagcttttgatacaccagacgacccttatttgccagaggaagttttatggaggcagaaagaacagttttcggatggagtgggatacaactgggtagatgaattgattgaattctgcgcgggacaggtttcagacgaacagcttgcaggagcaagtgcagaatttccgtataattcaccaacaactaaggaagcttatctgtacagatcgatttttcataaattctatccacaagttagttcagcacaaaccgttagaaaatggataccgaaatggcaggaaaatcaggatccgagcggaagagctaatgcagcgcacgtcaaagcaggtgttgaagcttcgagagcaggaattgttgcttaaagtatgaaaggagcgctgcttcttaatagatggaacacaatcattattgaaaataagttttaaaaaatccggaaagacatgtcaaatgtagttccggatttttttatgatttgaaagaagaaaaacttttagttaccaaaactcaaattccaaaacccgaaacccgaaacccgaaacccgaaacctgaaaatttaagatctgaatccttgaacatttctaaaaactaagttaattgtcgctctttgtgtttaggaaaaatattatatttggttaccattaataactaaccattttaaactttatctatgagaaacttattgcttagcagtgttttgtgctgctcactagcttcattaagtccggtgtatgcacaaaaaactgacctgccaaaatatattaaaaatgtcgaaggagtaaaagaatattctctgaataacggattgaaagtgctcttgattccggatgcttcccaaagtaatatggtggtaaatattgtctacaatgttggctccagaaacgaaggttacggagagaaagggatggctcacttattggagcatatgctttttaagagtacaaaaaatttaggggacattaaaaaaatgctttctgaaaaaggaggcgctgctaatggtacaacctggctggatcgtaccaattattatgaagtttttccatcgaatgatgaaaatctgaaatggagtattgaaatggaagcagaccgaatgatcaatgcgactattttacagaccgatttagataaagaattttctgtagttagaaacgagtttgaaataggtgaaaacaaccctgacggtgttttacaggaaagaatactttcttcggcttatttgtggcacaattacggaaaaagtaccattggaagtaaagaagatattgaacgcgtaaaagcaaacagattaagagttttctatgagaaatattatcagccggataattcaaccctgataattgccggaaaatttgatgagaaaaaagcactgcagtatgtaggtcaatattttggaagtattgcaaaacctaaaagagttttggataaaacgtatacgatagagccggcacaagatggcgaaaagtacgtggagctgaaaagagccggagacagtaaaaatatcggagcattgtatcacactgcagcctatgcagataaagactatgcagcaattgatgctttgggtgaaattttaacagcagatccgtcgggttatttgtacaaatcattggtagaaactcaaaagatttccagtatttattattggcagccaaccaccagagatgccagttttgtgtattttggagtagctgttcctaatgataaagacgttgtagcaacaaaagaactggtaagagccgaactggataaaattggatcaacccaatacacggatgaagatgtaagcagagcaaaagctaagattattaagcaaattgaaggggttaaaaataataccatttcttttgctataaatcttaccgaaattgtgggggcaggcgattacagattaggtttcctgtatagagatgcaatcgaaaaacttacaaaagaagacatacaaagagttgcggaaaagtattttaaaagtaacaacagaactgtcggagtatttattccttcaaaagacgaacaaagagttaaaccggtcgaatatactgacgagcaattagcggcttttactaaagactacaaaggaaaagcacttgaaaaagaagcggctccgtttgaaacttctattaagaatctgaaacaaaattttgttgaaggaaagctaagtaatggtgctaagtatggcttgattaaaaaagaaattaaaggaggaaaagttcaggcagcgtttaaatttccggtaagtaatgaaaaggatttgtccggaaaatcagatgttggtgccattttggctcaattgttaaagaccggtaccaccacccgtacaaaagaacaaattactgatcgtttagatcttctgaaatcaagtttatcatttggtttttcaggacaaacattaacggtaagtgtcagcacctataaagaaagttttaaggaagtaatggaaatcttaggagatttattgactaatgctacttttccgcaaaatgagttaaccaaaacaatcagtgaatacaatacctacttagaatcgaatttaaatgaccctaattctctggcctttattgaagtttcaagacaaacctctaaatatccaaaagagagtattttctacactgcgaccgtccaggaacaaattgatgcttacaaaaagataaaacagccggaacttattgatttctataaaaacattttagggggaaataatggagtagggactgtagtgggagatttagaagccaaatctacagctcagattttagagagtacttttggtaaatggaattccaaatcaaaatatgaaagagcaataccgacttattttgaaacacagaaagccgataaagagtatattactcctgataaagaaaatgcggttgctgtgggtaaaatcagttttaaaatgactcagaaagatgctgattatcctgcttttgtgatggctaatgaaatgttaggaaacggaggttttctaagcgcaagaataccgatgcgattgagagaaaaagaaggaatcagctatggagcaggatcgttcgtaaatgtacccatcaccaatgatgtttcgtattgggcttattacgcatttttaaatccaacgaagaaaaatgccgttgagattgcggcaaaagaagaaattgcaaaagcattaaaagagggcttcacagcagaagagttaaaatcaaatcttgtgagttggcttaatgaaagaaaaacccgattgggagatgacggaactttaatggatttgacgaatacttatctgcaatacggagttcctttggaagattatgatactcttgaagctaaagttaaagccttgaaaatcgaagaggtaaatgcggttgcgaaaaagtacttaagtttagataaaatgacttctgtttatgttggagattttaataaaaaacaataaagattagaaaaatcaatttaaaaaatccaaattccattttcaaggagttttaaattcatggaaaccgaaatgcattttataatgttatttcggtttttttatacggtttaaaaaataggcgttttgcaatttaggctctataaaagcaattgattttttgctgcattctaaatttttcgaatttggaatttaaggaaattggaatttaagtcttcttttaagcatatttttaggtttttcagacaattgtgttgataacttaagtgctttaaatcggaattttatgagtatataatttgcgtttttatatatttgcgtgttagacaataaatacatttttagaataaattatatgagcgaagaaatcaagaagaacaattattcagcagatagtattcaggcattagaaggaatggagcacgtaagaatgcgtccatcgatgtatattggagatgtgggagttcgagggcttcatcatttggtttatgaagttgtagataactctattgatgaggcgatgggagggcattgtgataccattggtgttgccataaacgaagacggatcagtaacagttgaggataatggtcgtggtattccggttgatttacataaaaaagaaggcgtttcggcacttgaagttgtaatgactaaaattggagccggaggtaaatttgataaagattcttataaggtttccggaggtttgcacggagtaggggtttcggttgtaaatgccctttctgtccatatgaaatctaccgtttttagagaagggaaaatctacgaacaagagtacgaaagaggtaaatcattgtatccggtaaaacaaatcggagaaacagaaaaaagaggtacacgtcagactttttaccctgataataccatctttacgcaaactacagagttttcttatgatactttatctgctcgtatgcgtgagctttctttcctgaacaaaggaattacaatcacctttacagataaaagagaagtaaatgaaaaaggagaattcagaaccgaagtttttcattctacagaaggactaaaagagtatattcgttacttagacggtaaccgcgagccaattgtttcgcatgtaattagtatggatcatgataaaggagaaattccggttgaagtggcgctgatttacaatacaagttatacagaaaatattttctcttacgtaaataatatcaatacacacgaaggaggaacgcatttacaaggttttagaagtggtttaacaagaacccttaaaaaatatgctgatgcatccggaatgttggataagttgaaattcgaaattgcgggagatgatttccgcgagggattaactgctattatttcggtaaaagttgcagagcctcaattcgaaggtcagaccaaaacaaagttagggaacagagaggtagtttctccggtttctcaggctgttggagagatgttggagaattatctggaagaaaatccaaatgacgccagagtcattattcaaaaagtaattttggctgctcaggcacgtcacgcggctaaaaaagcccgtgaaatggtacagcgtaaaaccgttatgggcggtggtggattaccaggaaaactttcagattgttccgagcaggatcctgcaagatgtgaggtttaccttgtcgagggagactcggcgggtggaacggctaaacaaggtcgtgacaggaactttcaggcaattttacccttacgtggtaagattttgaatgtggagaaagcgatgcaccataaagtattcgaaaacgaagagattcgaaatatctttactgctttaggggtaacagttggtactgcagaagacagtaaagctttaaatattgaaaaattaagataccacaaggtaatcatcatgtgtgatgcggatgtcgatggtagtcacatctctaccttaatattaacattcttcttccgtttcatgaaagaattgatcgaagaaggtcacgtttatatcgctgcaccgcctttatacttagttaaaaaaggaaacaaaaaagaatatgcgtggaatgatgttcagcgcgatcaggccaacgagagaatgggtggaagcgccgcaattcagcgttataaaggtcttggagagatgaacgcggagcaattgtgggaaacaacaatggatccgaatttcagaactctgcgtcaggtaaccattgatagtttggctgaagctgacagagttttctctatgttaatgggagatgaagttccgccgcgtagagaatttatcgagaaaaatgcagtttacgctaatatcgatgcgtaataaattttaaccatcaattcgtttaattgtttaaatttacttaaacgattaaacgaattgtcgatttatcaaacaaacaaattaattaataaccgataaagtataaaatatgaaagttaccattgtaggagcaggaaatgttggagctacctgtgcagatgttatttcttatagaggaattgcaagcgaagtagtgttgttggatattaaagaaggttttgccgaagggaaagcgttggatattatgcaatgtgccacaaatacaggttttaataccaaagtatctggggtgaccaatgattattctaaaactgccggaagtgatgtagtagttattacatctggaattccaagaaaaccaggaatgacccgtgaagaattaataggtataaatgcaggaattgtaaaaacagttaccgaaaacgtactaaaatattctccggatactattatagttgtagtttctaatccaatggatacgatgacgtatttggcattgaaatcgaccggagtaccaaaaaacagaattattggtatgggtggagcgttagacagttctcgtttcagaacctatctttcactagctttagataaaccagcaaacgatatctcggcaatggttattggagggcatggtgatactactatgattccattaacccgtctggcctcttacaacggaattccggtaactgaatttctttcagaagaagtattacaaaaagtggctgccgatactatggtgggtggagcaacacttacaggtcttttgggaacatcagcatggtatgcgccgggagcttctgtggcttatttggtagatagtattttgaatgatcagaaaaaaatgatcgcctgctctgtttttgtggaaggagagtatggacaaaatgatatctgtataggtgtaccttgtataattggtaaaaatggagtcgaagaaatattagacattcagttaaacgatcatgaaaaagccttatttgcgaaaagcgcagatgcggtgagaagcatgaatgacgctttaaaatcgattttagtataacaaatttcgtaaaaagaggaaaaggctgcacttttgcagtcttttttttgagattaattaataaataaattggttaatcttttcgttaattatatatttgctcgggttaaaaaaaatgttgtaattcgtgatcttgattttttagtgctaaaaaatcatatcagggcttattctatgggactttaaaacaaaaacaaacaataaaaaataattaatttttagtaataatgcagaataaaggacttattaaatttttcgcaattctatttgcattggtaagtatttaccaactctcgttcacttttgtggccaatagtgtcaaaagtgaagctaaagcttttgcaggagataatcctgataaagaattaaaatacttagattctattggaaaagaaaaagtgttaaaccttggttttactgattttacttataacgaagtaaaaaacaaacaacttaataaaggtcttgacttagaaggaggaatcaacgtgattcttcaaatttctgttaaagacgttttgaaaggattagccaacaattctaaaaatccggtatttaataaatcattagctgatgcaactgcaaatttagaaggaaacaaaacctatttaaataagttctttgaagcttttgaggctaactcaaaaggatcagtaaaattggcttcacctgatatttttgcaaacagaagtttacaaggagaaggtggtgtagattttcaaatgtctgatgcacaagttcaaaaagtaattaagaaaaaagttgacgaatctatcgaaagtgcttacaaagtacttagagagcgtatcgacaaatttggtgtaacgcaaccaaacatccaaaaattaggagaaacaggaagaatcttagtagagcttccaggggctaaggatgtagataggattaagaaattattaggaggaaaagctcaattagagttttgggaaacttttaaaatcgaagaaattggtaacttcttagtagcttctaacgaagctttaaaaaagactgaagttaaaataaaagaaactaaagctgttgctaaagattcattgaatgcattgttaacggataatgctaaagattcagttgatactaaaaaaggaaacaatccattatttgacaaaatgttaggtcagggtggtggaccagttttaggatattttgctcctaaagatactgcagctgtaaatgcttactttaaaagagcagatatcagagttttattgggtgctgaccaacacaatgcaaaatttgtttggagtaaaccaactacaattaaagacgcaaaaggaaaagatattgaagcagttgaattatatgctttaaaaggaaacagagacaatgttcctgcgatgagcggtggagttgttacagatgcaaaagatacttttgaccaattaggaaaaccagctgtttctatgcaaatgaacagccagggagctaaagtttgggaagaattaacgggaagagctttctctcaaaaaggatacattgctatcgttttagataatattgtttactctgcaccaggtgttacaagcggaccaattgccggaggtagatctgagatcacgggatcttttgatgttgctgaaactaaagatttagctaacgtattaaatgcaggtaaattaccggcttctgcagatattattcagtcaacagttgtaggaccatctttaggtcaggcagcaattgatgcaggtacaatttcttctgtattaggattcttattagtttgtttatggatggtattctattatggtaaagcgggttggtatgctaaccttgcgttattattaaacttacttttccttttcggaattatggcaagttttggttttgtattgacattaccaggtattgcaggtatcgtattaacattaggtactgcggtagatgcgaacattattatatttgaaagagcaaaagaagaattacgtgaaggtaaatcattgtctgatgcggttgtagcttcttacggatggcacggagcaatgcgttctattattgatgcaaacgtaacgcacgttttaactggagcaatcttgtttatttttggtacaggaccaattaaaggttttgcattgacattattgattggtatcgtaacttcattgtttacatcaatctttatcgcaagaatttttattgacagaaacattgctggaaaaggagatttaactttctctacaagtgttactaaaaactggtttacaaacttccactttgactttattaaaatcaaaaaattcacatacatcttctcttcaattgtagtagttgtgagtttagtttctatctttttcgtaaatggattagatgaaggtgttgattttgttggaggaagaacattccaggtgaaatttgaaaaacctgttgatgctactgtagtatcagatgaattgtctgctgcttttggtactccggttgaggcgaaaattttaggtgatgacgatcagttgaaaatcacaactaaatataaaattaaagaagacggtgtagctatcgatgaagaagtgaaccaaattttatacaagtcgttaacgaaatatttccctaacacttcttacgaaaaattcatcaactcatttgatggtaaaaagattggggttgtacagcaatctaaggttggagcttctatttctgaggatatcaaaacgaactcttactgggctgtattaggtgcaatggcggttattttcttatacttaatgatctctttccgtaaatggcaatattcattaggtgcgattgcagcggtagcacacgacgttatctttgtattaggaatctactctttatgctacaaattcatgcctttccacatggaaatggatcagcactttattgcggctatccttactgtaattggttactcgatgaacgatactgtaattgtatttgacagaattagagagttcatcatcggaaaccgtaaaggaagttttgaagatatcgtaaacgcttctattaacactacattatcaagaacgttgaatacatcattaatgatgatcatcgtattgttaacgatgtttatctttggtggagaatctatcagaggatttatctttgccatgttaattggtatcgtagtgggaacttattcatcattatttatcgctacaccggtattggttgacacgatttcaagtgatgataaacacacaatcgaagacaagcacaataaagcataatcagatgcttaagatatagaaaaaagatccagtgaaagctggatcttttttttgtgttatattagactaataaaaaaagtatttatgggtaggaaattactattgattctaattgttgtttttagcgtgtttaaagccttaggacaaactaaaaacgaaaagctggccataggaatcaattatggttttgggagcgagtttaataatagaaattacacgtataccaatcatttttataaagtagaattgcgttatcggcttaatgaatcaaagcattttaaatatgaggttttagtccagccggaagttaattttggaagacatcaattgataaatttttactttgtaaagccggacagacctgattatcttgaaaagagggaagaatatacgaagttgaaggaggtgcatgagtatgtgttgaatcttggttttttggtcaggaaaccaattggaaaagttttctctgtttatgcttcaggaagtattgggccaatgattaccgatacagaaacagaaagaatgtctaaaggttttgcttttgcagatgtttttgcgatgggtttttcggttaaaatgaatcgcttacagctggatgcccgcggtaacattcggcacgtttcaaatggaggactaaatgctgaaaatgcgggatataataccagaaatattgaattgggtatttcgtatttcctgtaaataaaaacgaattaatgaaattggaatttgcgctgaaagagctatgacaatagtatagtgcgtagcactgtgaatgatgctggcaattatgagttacgccctgaaagggcaaaagcctgatggcaaagaaaagcatccggcatattttgtatgagattctctaagaatgtggatgtttttttgttgagatttaggagcgaaaattgcttttgccctttcagggcagttttacatcctaatctaacttatagtgcttcgtactatgcttttgcttttaggactttcagccctattctctctcagcttttgtttctgatccaaaaaaaagcgtccgataaattgaattatcggacgcttttttatagttttttatcgaatggattaagattctgctaaaggatttctttgcgctctaatgacgaagaaaagtccaataatgataaacggaatacttagccattgtccggtagaaaaaagacctaattcattttcaaatccgccctgactttcttttacaaattctaccacaaaacgtactgcaaataagagtaccagaaacagtccgaatagtaatcctgattttaatcttgcgttcgttttccagtataagaaaaacaaaatcgcaaaaacaaatacatagctgatagcttcgtataattgtgttggatgttttgcgggaacctgagccagtaaatcagcaaatttaggatctgttgcgatagcggtatacgcagctttaggatctgcgatttgagtagcgtttaccgcttcgtttttactgaactgatcgtgtaaaaaacgaattccaaaggcagattttgtttcatgtccgatgatctcagaattgaaaaaattccctaaacgaacaaaaatagccccactggcaaccggaattacaacacggtctaaaatccataataatggacgtttcaaaatctttttgctgtaatagtacatggcagcaatgatggcaatagctgcgccatgactggctaatccctgaaatccggtaaattcaaatttaggctcgaatctgacaggtaagaatatctcaagtaaatgatttctgaaatattcccaatcgtaaaataaaacatgtcctaatcgggcacctattaacgtagctaaaacagtccagacaaataaagagtctaacttgtcgatagattcgttttcgcgttcaaagatttttttcattaaaaaccaccctagtccgaaagcaattacgaacattaaactgtaataacgaatcataaaaaatcctagatcgattccttccgaaggattccaaacgatatttaggggctgtgtcatgtgctgttgttttttgtattttgtaaaaatagatatttaaagtagtgttgctctttataaaaagttaatgtttgtgtgaacatttcttttcaggaacggggtcgtaaccggttcttccccaggggtggcagcttaagattcttttcatgcccagatagcctccataaaacaaaccatgagtctgcagagcctggatcatgtaagtagagcatgtaggttcaaatctgcaactcgccggagtaaaaggcgatattgcagattgataaaagcggactaataaaacaaatggagtgattactttcatgatttattagaaaatgagtgatttatatagagaagctggttccttcttttccgtctttcaactgaattcccagaccaatcaattgatcgcgaatctgatctgaaagagtgaagtttttgtcagctctggcttgatttctcatcgcgataagcatgttcacagttccttccagtttgtcggtatttccgtcagcagctttgtcattggctaagcctaaaacatcaaaaacaaaagcattaattgcagttgtaaaagtgtttaaatcttctgctgagatcgtttcttttccgtctttcagtaaattgatataacgaaccgcttcaaacaattgcgcaatcagaattggcgtattgaaatcatcattcatggcatcgtagcacaattgtttccatgctgcaatgtcaatagaacttgttgtacctgctgaaattgccggtaaagcatctacagcttccattagtcttttgtatcctttttcggcagctacaatagcatcatcagaaaaatctagtatacttcggtaatgtgcctgtaacatgaaaaaacgcgttacagatgctgaaaaagctttgcttaggatggtattgtctccgcttaaaatctctcccggtaaaatgttgtttccggtcgattttgccattttctttccgtttaaagtcagcatattggcatgcatccagtagtttaccggagactgacctgtacaggcttcgttttgtgcaatttcacattcgtgatgtgggaacttcaagtccattccacctccgtgaatgtcgaaatgatttccaagatatttggtactcatggcggtacattctaagtgccagcccggaaaaccatcactccatggcgaaggccatctcataatatgttccggttctgcttttttccaaagcgcaaaatcctgtgggtttcttttgtcagattgtccatcaagatcacgggtgttggccagcatatcttcgatatttctaccgcttaaaattccataattattggtttcgttgtatttcacaacgtcaaaataaaccgatccgtttgcttcataaccaattccggtatcgataatttttttgatgatttcgatttgctcaataatgtgtccggtagcagttggttcaatgcttggcggtaagaagttgaaggatctcaatatattatgaaaatcaacggtatagcgctgaacaatttccataggttctaattgctccaatcgtgctttcttggcaatcttatcttcaccttcatctacatcgtctacaatatgccccacatcggtaatgttacgcacatatcgcactttgtaatctaggtgtaaaaaatacctgaatatcacgtcaaaagacatgaaagttctaacatttcctaagtgtacattgctataaaccgtaggtccgcaaacatacattccaacgtttccttcatgtatagggttgaaactttctttttcacccgaaagtgaattgtatatttttagaggttgagctgtgtataaaggcatttttttgtcgtttaatcgtttatttgtttaaccgtttatttgtttaacgttgaatcgcgtaacgttctgtaattacttaagttttattcttttgaaagatagtatttttttaaactgtttatctgattgcagattttttctattttttctcgggtttcaagatattctgtcccggaaagatagtttaaatctctggaaattatcaaatgatttaaagtttccatcgctgacgaataagaaatcgttagaaaatgagctttatctttattcgtatttcgcgacgttccttctgcaatatttgttgcaattgaagaagaacttctttttatttgagaagtgattccaaatagctcatttggcgggaacgtatcagtcaatttgtaaatgtctaatataaacattcttgcattttgccaaacttctaatttctcaaaagaaaacgtgtacattcttttctgtttaattgttgatttgtttaaccagttaatcgaaagttttactcaaagaaaaatgcgattaaacaaatcaacgattcaccgattcaactagaattgtgtatccagttttatatagtccaaaagttctcttttaacttgcggatctttaaatctaccgccaaattcagaggtcactgtgctgctttcgatatctttgattcctctggaatttacgcaaaggtgtttcgcgtcgatcacgcaggctacatcttcagttccaagtgctttttgtaattcctgaacaatttgcatggttagacgctcctgaacctgaggtcttttggcataatattctacaatacggttcattttggataaaccaataactcttccattagagatataagccacgtgagctcttccgatgattggcagtaaatggtgctcacaagtagaataaaccgtaatatttttttctaccagcatttcaccgtatttgtagttgttgtcaaaagtagaagcttttggctgtttggaaggattaagacctccaaaaatttcttttacaaacattttggccactcggtttggagtacctttgatactgtcatccgtcaaatccattcctaaggtttgaaggatgttttcaacatctttttttattttttctattttttcgtcatcacttaagtcaaaagcatccggtctcaaaggattttttgcgttactgctaaagtgattgtctcctatttcgtctaaaaaatcttcgttatttatcattaaaaacttactattaatatgggtatttctttttaaggcggtaaagataattaataaatggtaaaccttttctatggtttttactatttaattgcggcttttgctataaaattcaaattgtagagaaaatgtggttttttttaaatacaaaagacaataacacagtatgttattgtctttttaaaattttatattcagaccttatttcttattgtaaaccaaaagagcttcttttaaaatgtttacagcagtaaccaaatcttttttgtttaaaacgtacgcaattcgaacctgattcagtcccattcccggtgttgagtagaatccggcagcgggagcaaccataaccgtttctccattcagatcgtaactttctaaaagccattgtgcaaaattttcagagttgtcaatcggtaattgtgcgatgcagtaaaacgctccttttggtttcgtcacaataacgccttcaattttgttcaattctgcgattaaagtgtcacgacgctctttgtattcggaaattacctcgtcaaaataactttgcggagtatctattgccgcttcacatgcaatttgctcgatagtaggaggactcagacgtgcctgtgcaaacttcattacagttgccaacacctctttgtttttggttaccagacatccaattctggcaccacacatgctataacgtttagaaacagaatcaaccatgatcacattttgctgaacatcttccaaattcattacagaaaaatgttcgtcgtctccgtcgtataaaaactcgcgatagacttcgtcagcaatcaggtataaatcgtgtttttttattaagcctgccaattgtctgatttcttcttcagaatataaatatccggttggatttccgggattacaaattaatatggcttttgtttttgtggtaatgagtttttcaacttcttcaatacttggtaaagcaaatgccgtttcgatagtcgaaactaaaggaataactgttgcacttgttgaagatgcaaatgcatggtaattagcataaaaaggttccggaatgataatttcatctcccggatctgtaattgtggccagcgcaaatagtaaggcttcagaaccaccagtagtaacaatgatgtcttctgtatcaacgtttacattttgacgctggtaaaattgagctaatttttttctatagctttcatatccggctgacggactatattctataagggttaagtcaatattttttaccgcctcgatggccacttcgggtgtcttgatatccggttgaccaatgtttaaatgatacactttgtgtccttttttctttgctaaatcagcaaaaggagcaagtttacgtatcggtgattcgggcatgtttctgcctttgtgtgagattgttggcatgggttttatttattgaagtgcaaatttgcatttttttttcgaatttaacgtaaacattacaggtacttattaatttgtagtaattatcgatatttttagtaattttatcttaaaattttatcaatgagaaaacatttcatgttgttttttgggcttttcacagcttttacacttcaggcgcaagaagattttcaaatagaaaatcgtgcctctaaggttactataccttttacattaattaataatctggtttttattcctataaaagtaaatggagtagaactaaatttcctgttagattcgggtgttgaagaaaccattttgttcagtatggaagaaaaacaggaagttagttttaaaaatgttcagaaaattaagctcagaggtttaggaagtgaagacgaaattgaaggtttgaaatcgaccaataatgttttagaaacccatggtttaagatcgaacaatcatttactgtatgttattgtggatcaatcttttaatttatcatcacacattggaattccggtgaatggcattattggatataaatttttcaaaaacaacctcgttgagttaaactatcaaaagaagaagattgttgttcatcagaataatgaagaaactctaaaaaaactgaataaaaaatttaaagcagtcccgattacgatcgaaagatctaaaccgtatctgtatacaactgcatttgtagacaatgttgctgtgcccgcaaaaatgttaatcgatattggtaatagtgatgctttttggatttttaagaatgatattataaaattaccgactaaaaattttcctgattttcttgggaagggtttcagtggtgatatcgaaggacatcgtgccaaaattgaaaagttttctataggggagttcaattttaaaaaccccatagtggcttttccggattcaagttcgattcgaaatgtgaagatggtgcccgggcgaattggttctgttggcggggaagttttaaaacgatttacggtcgtattggattatgcggataaaatactgtatcttaagaaaaatagtaaattttcagaaccgtttacttataataaaagcggaattacagtgcagcataacggacttcaatgggttcaggaaacggttcatctggagacggtaaaagttgttaattcagttgaagaagcaggttatctaggtaaaaaaaatgatgatttcagatacaagttctccttaaaaccggtttatgaaattgtaaacatccgtaaaaattcagccgcagaacgttgtggattgaaaacgggagatattattgttcgaattaatcgcgcacttccatacagatatacgttgcagcagattaattcacttttaaaatctgaagaagatgtttggatagatttagaaatagaaagaaatagtctccttttaaaattcagatttaaactggaagatgaattgtaatgggggttagcgctatttttttgtagagatttttttgtaaagatttaattattaaagtaagttctaattgtttaataaacattattatttcgttatgtttgtaaaaaaataaccggaagtctatggtgaaaaaatacactagtttcttgcaatttgcattgttttttattgttttgttggcttgtgtttcaaaaagccaggcacaatgtgcaggaaccgacgagcaacatataatttgtgatattgaagatccggtcaatcaatcaatttctttgttttcgttgttgggaggtacaccaactccgggggggatctggacggataataataatctaagaggtctggatcctgctacaggaatgttaaatgcccagcttatatcaagtggaggtacttaccaatacacttataccgtaacaacgccaggatgtgttgtaaataaagcaatcgtaaccttaactattggcgcatattcgggaattggaactgaagctacaatctgtaatgacagaggagagtataatctttttacggcatttaatagtgttattatgggaccgcattccaacggaacatggagggatagcagcggtaggattgtaaaatctacgttcacggtaccaaaagtacaagtgaagaccacttataattttacttatacagtaccgcctgtgctggcatgcgaatcgacaccacttacttctgccgtgaagataacggttgtaaggaagccggaagccggagatccaacagataaagaattatgcggcacgactgacttagggccttatgctaattttgacctgcacgagctgctttcaggagaagatatgggaggtatgtggagtggtcccggtattactgcatcaacgggtcataccgttgatcttcaagctttgtttgctacatcaggagcgggagagtacagctatacctacactgtttttgcagttccgaatcagaatatctgtgagaatgatagtgaaacggtaaaaattacactggaaaaaagattagattttaccggcgcaagggtgttggttgattcggatatttgtgaagataaaattgcaacagcatcctataccgcaagaattatgcaaggatcgcaagtaattccgaacggagaatatgaagttcagtatactattacagggcctaccgttgcatcagcaactgtaaaggctaattttacaaatggggtattggtatttccgcttagctctaattattttaagcaaataggtacatttacgcttacggtgactagcattatagctacatccggtaaaaaattatgtaccaatataattggtattttatcagatgatttaatcattagtccattcccgcgattggatggtgcagtattaacaaccactccggtctgccagaatcaggcagcaatagttcagctttcaaatgcttcgttattggctaatggaacttacagaattacttataatctgatgggagataatgttgttaccggtagaacagtaaatattacagtttccgctgggagtgcaaactttgtaattccggcgagtctaaatgtaaaaagcggatcatcagcaattacaattacgagtatcacaaacattacaaatccgactccccaatgttcgaatgtagccaatgtaaaagggaatcagattattaatcctctgccagatgggacaactattgtcgtacaggtcgaaaacttttgttttggagaaccagttcctgtagctgtttccggattaggaaatttaactgacgttacgctctcttacacactttcgggtgataattcttcggtattacaaacggttgttttagcagtagcaaacggaaaagctagttttgttattccgcaaggattgcttttgaatacaggttcttcagtaattatagcccgtaatttaaagaacaacactacgtcatgtgatgttaatttaagtaacgtagtggattcttttgtgataaatactattcccaacgctcctattgcaacaagtccgcaggtattttgtaaagtggagggagcagtaattacaaatttaacgccacgcggggctcagtacaaatggtatagttctggaacggcaactacaccacttgcagatacttatgttttaaaaacagagcagctttatgtaagagaaatttctactgcaaattgtatttctgcaccaactcccgtttcggttgtggtaaatgatacgccagctccaactctgaattcaggtggggaaaatttttgtggtttaaaaaatccgacaattgcagatttatccaaagcgaccaatgtatcttcgacagttgcgtggtatgatgccgaaaataacggtaatttattgacttcaacaactttgcttcgcgataaggcaacttattatggtttcgatctttcgattgtaaccagttgtatttctgatgattatttaggggttacagtttctttattcgattgtaatccggaagaatatgctttttttattccggacggattttcaccaaacggagataacgtaaatgatactttcaggattccggatatagaatttttatacccggattatactcttgaaatcttcaacagatatggaaatgtaatgtttaaaggaaatagaaataaacctaattgggatgggagaaattccgaatcggccggttttggtgatggaattgtaccaaatggagtctatttttatgtggtcaattttaataaagacaacagacgtccgcagcaggggcgactttacctgaacagataatttctttttatagtatttaagataagtttcaaatgaaaaaagtactactttttataagtttcctcttttgtatcacatcagcctcagcccaacaggatcctgagtacacccattatatgtacaacatgagtgtagtcaatcctgcttatgcgacaggcgttcctgctatgatgaattttggaggattgtacagaacgcaatgggtgggagctgttggagcgcctaaaacttttacctttttcggacatacagctttaagcgataaaattgaagtgggattatcattggtttcagatgatattggcgacggagcaaaaaaagagaataatttttatgctgattttgcctatgttttaaatttgggtgggaaaaataaactttcgcttggattaaaagcaggttatacatcgctccaaagtaatttcaacgggtttaaattagagagtgggaatgcggccagtgatttggctttcgccgaaaatgtaaacgtcaccaagccaaatattggagtaggggcctattactttagagataatttttatgtcggattgtctgtgcctaatttgttgagtacgaaacaccttgaagaaaaatccggaatcaacgcttacggatcagaagccattcatacttttttaacggcaggatatgttttccaactcaatgataaggttaaattaaagcccgcttttatgtcaaaatttgttctgggagcgccggttactttagacctgacggccaatgttttgtacaataataaatttgaattgggtgcggcctatagagtaaacgatgctgtaagtgctttgttgaatataaacgtaacgccaactttaagagtgggctatgcttacgatcatactttatcgaatatgggcaggtttaattcaggtacacacgaaattatgctgctttttgatttagacttattaggaaaaggatatgataaatcgccaagattcttttaaaatgaaaaataggaaaaaattactcgttattatcttcgtatttttaatacagtttttacaggctcaggattttgaattgggcagagccaaacgtttttttgataaaacgcattatgctgaagctattattttatacgaaaaattagcagaaaataagccttcgcaggaagtgatcaggaatctggcagactcttatttttacacgaacgatttgataaaagcacagcgttattaccgacttttgatccaaaattatggtaatggtttagatcgaaattattatttcagatatgcacagactttaaaagcaagcaacagttacgacgatgccaatgccgctttaaaagagtattattcaaaatcagatcatagtgatgcggtttctaattttgagaaagaattaaaaactctggagaatgtttcggcaatagggaaacggtatgaacttaaaaatttggcaatcaatacccctaattcagagtttggggcagtaaaatataaggaaaacctggtttttgcaggagtaaaattaaagcccggattgttggataaaaaattcaaatgggacaataaaacctatttgaatctggtgtcgattcctcttaaaaacagcaattccacggattctatagtgcattattttgccaaagagttaaaaagcgggatgcacgaggcaaacgcggtttttacaaaagacggtaaaacgatttattttacgcgaaacaattccaagaataaaagcaagaaaacaaacgagcagaaaatttcgaatcttcaaatctttaaagccgaactggtggaagggaaatggaaaaatgtaacgtctcttccgtttaacagttcagaatattcagtagaacatcccgctttgagtccggatgaaaaagtgttgtactttgcatcagacatgtcggggactttgggttcgtttgatatttattcggtaaatattaataaaggagcatttgatacaccccgaaatttaggaccaacaattaataccgacaaaagagaacaatttccctttgtttcaacagatcaaaaactttatttttcttctgacggacatttgggttatgggtcacttgatgtttttgtttccgatattaaaggaaacgactatagtaaaccgttgaatgtgggacagcctttgaattcaaatggagatgatttttcttttaatatcgatgccgataccaaagaaggctattttgcttccaatagagagggaggaaaaggaagcgatgatatttatcagattagagaaattaaagatctgattgtagaagattgtaagcaattcatcgcaggaattattacagatgtcgatacgaaactgcccttggaaaatgcgacagtgaccttgcagaattcagatcaaaagattctgagctcaacaattacttctgcagatgggaagttcagttttacagtggattgcgaaagttcgtttacggttttaagctccaaggaaaattacacaagtgaatcgagaaccatctcttccggaaaaatcagagatgcaagccatgatgcttcgatggcattaagatctttagaagttataaaacaggaagaactgcaaatcacagaaaagaaaagaaaagaagaacagcagcttgcagaaaagaaaagacaggaggaagaaattgatacgaaacgaagaaaagaaagagaagcattggctgctattgctttaaaagaagccgataaaaaggcgaaggcagatgaaattatcgcaaaagatattagaaagaaagagaaaacagctcagattcttgcacaggaaaaagatgtggtaaaagacagtaaaggcagattaatcattaaaaccgatccgatttattttgattataatctgtggtacatccgaaaagaatcgaaagtagtattaggtcgtgtggtcgaattaatgaagaaatatccagacatggtaatcgaaattggatcgcatactgattcaagaggaaatgaaaagtttaatgccaatttatctcagaaaagagccagctcaaccagagattttatactagagtcaggtattaatgccaaaagggtaacggctaagggatatggggaatcagtacctattgtgaaatgcaatcccgatgaggcctgttcagaagaagaacatgaattgaacagaagaagtgaatttgtaattaaggacttataattacaatagttaaaccaacccgacagattttaaaatcttgtcgggtttaatgtttaaaaaattagtttgaaccttttcttttggcttcttttttatttaattttaacccactgggtgaaattgaataaagattaattctaacacatagagacataggtattaatgctcaaaaaaggacaataaaaaagaaatgtttttcttttacctggtttactatgtgtattttaattagtgaaacgccttctctaagtctggaaagactatgtttctatgtgttagcaatttcacgcaatagaattagttttaaaaataacaatgatttaaaaaataataattatgaaaaacctagttgtatcctgcttgcttgtgacatgtatcggacttcaaagctgtaaaaacaatgagaatcagaaggaggctgaagcagctaaagcagctgctgaaaccattgtaagtacagaatgttataaagctatatatgaaaaagatactatcgatttaaaagtaaacacactaaaaaatggaaagataagtggtaacatgactatgaaagttgccgcagcaacagaaagagtgggagaacttgcaggagaatttcgcggagataccttatttgccgattatacttttcaagaggtgaccaacaagaataaaacgtttaaaaatccaatggcattcttaaagaaagacaaaagacttattttaggtaacgggacaatgcagactactatgggagttacttacctggtaaaagataaaccaatcgattttgatcgtgtaaaatataaatttgatgctgtcgagtgtactgagaaatcaaaataataacctctaaaaaacaaatccgacaggtttttagaacctgtcggatttagtttaaaaatgggataaaaaaagccgcttcttaattgtagaagcggcttgctattttttagattatattctttataaaacttcacctttgatttttaaggcaactctaccgtcagggtagtttacagcatttgtttcaacggtaattgttttacgaatcggaccggaaaccatgttgtattttacatcaattttacctttttttcctggcataactgctgctgcgggtttggtaacaacgatagaacttacggtagattcagcaccagtaatcaaaagcggggcatcacctgtattggtaaattcaaaagagcgaactccgttgtcacttttcgaaatttttccataatcaattgtattgtcttgggcttcaaattcaatttttgggccgttttgtgcataacttattgtactaaacaatacgactgcaataaaagaggctacatttttcatttcaaatttttttttaaagttgtaagtaaatatacattcttttaattaacacacaaattattaattcgctttttatagtgtacttaattatttacttttgctgtcaataattagtacaaaaattgaaccagtttttctgtttaattgtttagccgtgtatccgcttcatcggttgatgattagcaaaagctgtaattacagtaacaaaacgattgaacaaataaacaaattaacgattaaacaaccctagtaaatgacaattccagcacaatttgacgctaagacgatcgagaacaaatggtatgattactggatgaagaacaactattttcattcagaacctgatcacagaacaccatatacaattgtaattccgccaccaaacgtcacaggagtccttcacatggggcatatgctgaacaataccattcaggatgttttaattcgtagagcgcgtcttaaaggttttaacgcctgttgggttccgggaacggatcatgcttctatcgcgacagaagcaaaagtagtacagaaattaaaagcggaaggaatcaataagaatgacttaacccgtgaagaatttttagcacacgcctgggaatggacggataaatacggtggtgtaatcttagatcagcttaaaaaattaggagcttcctgcgattgggaaagaactaaatttacaatggatcctgatatgtcagcatctgtaattcgttcgtttgtagatttgtacaataagggattaatttacagaggataccgaatggtaaactgggatccggaagcaaaaacaacgctttctgacgaagaagtaatctatgaagaacaacaagggaaattatttttcttaaaatataaaatcgaaggctcagaagattttctgacgatcgccacgacgcgtcctgaaactatttttggagacactgcaatctgtattaacccaaatgatgagcgttttgcacatctaagaggaaaaaaagctatcgttccaatttgtggaagagttatcccgattattgaagacgaatatgtagatgttgaattcggaaccggatgtttaaaagtaactccggcacacgatatgaatgataaaacgttaggagagaagcacaatcttgaaatcgttgatatctttaatgaagatgctacattaaatagtttcggattgcattatcagggcaaagaccgttttgtggttcgcgctgaaattgcaaaagaattagaggaaatcggagctttggctaaaaccgaaatccatttgaataaagtgggaacctccgaaagaaccaaagcggtaatcgaaccgagattatctgatcaatggtttttgaaaatggaagatttggtaaaaccggccattaagtccgttttagaaacaggagacatcaaattgcatccaaaacgtttcgagaatacttatgcgcattggttaaacaacatccgtgattggaatatctcacgtcaattatggtggggacaacaaattccggcttattattatggagatggaaaagaagatttcgtagtagcagaaactattgaagatgctttggctttagctaaagagaaaacagctaacaacttacttacagcagctgacttaaaacaagatgttgatgccttagatacctggttctcatcatggctttggccaatgtcagtttttggtggaattatggatccggaaagtgcagattataaatattactatccaacaaacgacttggtaacaggtccggatattttattcttctgggtagccagaatgatcattgcaggttacgagtacgcaggtgaaaaaccatttacgaatgtgtatttaaccggtttagttcgtgataaacaacgtcgtaaaatgtctaaatcattagggaattcacctgatcctttagatttaatcgataaatttagtgcggatggagttcgtgtaggattgcttttaagtgcttctgccggaaacgatattatgtttgatgaagaattgtgtaatcagggaaaagcattttcaaataaaatctggaatgcctttaaactaatcaaaggatgggaagtttctgaaacgattccacaacctgagtcttcaaaagtagccatcgaatggtacgaagcaaaattgcagcaaaccttggttgatattgaagataatttcgaaaaatacagaatttcagattcgttgatggccatttataaattggtttgggatgatttctgttcgtggttcttagaaatgattaaaccggcctatcaacagccaattgataaagtaacgtttgataaagcgattgaaatgttagaaagcaatctgaaattgctgcatccgtttatgccattcttaaccgaagaaatttggcatttacttgctgacagaactccggaagaagctttaatcgtttctacatggccggaattaaagtctttcaatgccaatttaatttcagattttgaaagtactattgaagtaatttcaggaatccgaacaattcgtaaggataaaaatattccgtttaaagatgcgatcgaattgaaagcaatcaacagtgagaatatcacaacctattttgactctatcgttacgaagttagggaacatttcagctttcgaatatgttacggctaaagtagacggagcattgtctttccgtgtaaaatcgaatgaatatttcattccgatttcaggaaatatcaatgtagaagaagaaatcgccaaactgactgcagagctggtatatacccaaggtttcttaaaatctgttcaggcaaaattatctaacgaaaaatttgttgccggagcacctgaaaaagttttggctaatgaaaaacagaaagaagcggatgctttggcaaaaattgctacaatcgagcaaagtattgccggattgaaataattcgctttgtaattaatatttaaacccaacagatttttgaaaatctgttgggtttattgtttttaatcgtcacgaattcacgaattaatcatttgctcacagatagtaaaaaataaaattcgagaattcgtggctattaaaatagtttactttacaggttctcgaagtatggttcttaatttttcagaagctgtttttcggaagtctgataaataaatttcatggtgtaagccattttgctcgagctggtgtactgtagaaaactcctgtatttttttcagcgtttgaggctcattttcaaaggggccgatatgaagaacctgtattactttgccttccgccatctcgtaaaattctattgatttcgcccgttctatttgtttcttatttactgtactttgaatggcttcttctgtttgttctttagttacgaaatccggcattctgatcataattctgtaatcccactcacttcggggtatttttagcggagcttcatccatagaaatgcctttgtatttttcagtatcaaaactccataaggcttccagttttggaacaacaaaatcattatttgcggctttctgcataaatttaatagcataagcagtggcatacaaggcctgaatattttccgagaattcttgtcccgaaggatccccttttcctgtaatcgagatgtaatttgttttttcaatataaacgatctcaggattagttttagccctgtagtatactttgtcggtttttgttaaatctagtttgctcatctttttagttttattacaaattaaatcacagaaggtgacaacagtatgtcagcaggaaaattctacatcttttttcttaaaaaaaaaatagccacgaattcacaaattgtttgttttcatagatggtaaaacaaaattcgagaatttgtggctatcaagataaaatgttgcttttttctcaaaacagagaaaacgccccgaattcacgatttgtttaggatgtaagctttgaatataaaattcgagaattcgtagcgattaaaaagaagccgttattttttcttcctcaaaaccaaaaatacaggataagaaatcaaagtgagaacaacgattatagcaaaaccttttggatcgctgaaaataaatcctattaacaaagcaatcgaggctacaaaggcaaatattgtcgtccagggataccaaaaagaatgatacggacgtggtaaattgggttcagtggctcttagttttaagagagaaagataagctaatccccaaacgataatagagataaaggctgcgaaagaaaataatacttcaaaagagccaatgcaaattaaaaataaactgaaaagcgacgaaactaaaagcgctataattggtgtcccgcctttatttactgttgttccttgtttgaaaaagaacccgtcacgacttaatccgtaaaggattcttggcggaatcatcataaaagcatttagtatactgattaatgaaaaaatggaaattaccgtaacaataatagctccgttttctccaaaaaggatcttggcaacatctgctgcggctaaatttgattttgccagggtttcaattggtaaaacatgaaagaaagcagcgtttaccaaaacataaatggcaaccactaaaaagacaccgctgtacaatgacttgggaatatttttgttgggattatcgttttcttcggcaaaaaagcaaacgctgttccagccgttgtaagtcccgatgatcaactgcaatgatttgaaaaatccgaagattagtccaatttgaaagaaagaatggtctgttttgattttagggacttcagtgcctgtgtacataaaacaggctatgaccaaggctacaaagcagattacttttaagaaactggtaatttgctgaatgacgctgccgttttttacaccacttaaatgaatgagtacaaaagcaagtaataaagaaattgccatcacggtagaatagttcgagagtacaggaaacaaaataataatgtactcactaataacaatacaataaaaagccggtggtgttacattgacgataaaatcaaaccagccggaaagaaagccggcatattcgccaaaagctcttttaatatagttataggaacctcctgctttgggtaacattgtggaaagttctgcataggagttggctcctaacaaaacatataaacctccaaagagccatgaagcaataatgagccaataattgtcgagtagggaagcaatgctgccgggtgtacgaagaattccaacgccaatcgttcctccaattaatacagcaatattaaaacttaagccaagacttttttgcaattgattttttttagcatctgacatatatcggagttttgttttggtgagaatttttatggaacaaaagtaatacaatctgattactttctttagtgaaaacaaaaaacctcatctattgtcagatgaggttttctgtttaaaaccagacttttttgttttcgttattgaaatacggcaaaagtccggagggcaaaatctaattcaaaatttagaatttatattttaagcttgtcaaaatttgacgaggtgcaattgggttgatactgtaattttcgtgaacagtataattcaattcgtttgtaatattagatagtttacataaaacagagaattttctccactcgtaacctacagaagcatcaatggttgtgtaaccttcgataggaatatctctgtctctaatggtaacaatgtaagcaggatttggttttggattggtaggtgtaggcttaacagctgtccacagataatcatcattccatccacctaaacggttaccaatatagttcgcgattgctccaaatgaaactcctctaaacattccttcctgtaccttgtagtagaagcttaagttggctgtgtttttaggtgttcttacaaccggatctcccgctacaaaacttccacttgttccggaagttttagtataacgcatatcattatagctataaccggcaataatattaagtccttcaataggtgttgcagtaacatcaatttcaacccctttacttttagtagctccacccaatacttttatgcttgaattcacattttcagtaataccatcggctagaaatggtgcggtttgagccaaattgctgtttgagatttggtaaaccgttaagtttgtgcttaacaagccctcaaagaattcttttttaatacctgcttcgtattgatcaatgatcgatgcttcaattgttttgttgtcaaccgtgaatcctatatttggtgaaaacgagttcgagtagctggcaaataatgaagtgctttttgttggttgatagataatacccacttttggagagaaagcattgtccagttttttagcaccaacttctgctattgcattttccggagcgaccgtttgaacttttgtaccggtgttataagtttctttgtaagtggtagcttggccttcttgccatgaccaacgaatacctgctaatactttgactttttctgtaatcgaaatcagatcctgaaaataagccccaaaacgattggtttctgtttttagaatttgagtcgctcttgcgtttggaatatcatttttttgttttgacggatcaaaagcaaataaattgatagtgtcataatttgccggatcaaaagcataagtgtatccggtagcaaatgaattttcccaatcaatacctgtatatacttgatgttttactgatccggtattgaaatttccttgtaaacttaattggtcgcccaatatctgctctaaatttttattttgaactaatgctctggtccagtcgccactattggttatattagacatctgagctgtagatttttgagttctatcataactttggaaagaactattaaagtttagtttccagtttttattgaaatcatggtttaataaaaccgaagcacttgctgattttgtagtaccattagaccaaagtgatccgtagaatgcattacgaggtaagtcaagaatttgttttccgataagtcctgttccaaaatccggagtccagtctgctgttaaataatccccttgtaccgtaatttgtgtttttggattgatgataaaaagtaaagacgggtttacatatacacgttcgttttttactacatttctgaagctttcagagttctcgtaagaaccgtttattctaaaagcaattgacttgctaagagggccataaaaatcgaaagaaggtttgtagaacgcataacttccaatttgcatcgatacctcaccgcctgatttaaatgaaggtgttttggttaccaggtttaagatacctcccggtgcaacgtttccaaacaataaagccgaacctccttttaagaattcaactttctccagaccggaaacatcaggaatggaacctgaattgtaacggaatccgtttttaaacatattgttggcagacatgtcatatcctcttgagaaaaaagattcctgtgcaccaccacgagcagaacttacataaacaccattagcgtttttaataacttcacttaaacgaatggcttgttgttgttcgattacatcagaactaataacctgtatgctttgtggattgtccattggttttaatcccgaacgaactgcagtaaccggtttaggctctctattggttttaattaatacttcatttagtatttctccttttttattttttaccgtgtcattggcagttgaggctgcctcgtcgcttgaatagttttgactgtaagaagcaaaacttataaaggataatgcaagtagtaaattatatttcatgttgcttatttagatttaataaaaataaatttttgcaaatgtaatatcgagatacggtcttaacaaaattttcagagtttttctagattaaaatttcattagaatagtcttaagattggcttaagattttgtttttctaaattttattgagtaaggaagaagaagagagagtgtaaaagatattttggttaaaaaaagccttgctcattacgaacaaggcctaactaactataaaattatcaaataatgaatggactatattatttaacggcaattaaataagttgccatcttccagatttcgttgtaatttttgccattatgttctccggcagctttttcggtataagcaaattctaccatataatttcctgaccaaagtggtgtaaaagagatttctcctttgtcattgctccataattctttttcccaaccatttggagcaattacttttattttttgttttttagctgctgcaccttcatacaaagcattgatgtttagtactgttttttgtttagccgctgtcacttctttagcaaagacactaatgatgtttgtatttgcggcagcatcatttcctttggcggcattgccaacggtaaccgttgcgcttgaattgtaatctaatttcatggtaccgtatacatcttttacagtatgatgcatcacaaccgtataaacgccatcctcatctggtgtaaaaaaggcctgatatttattttctaaggctgtagcggtaagttttgtttctttttttgacgggctaattacaaccagtgaaaaatcttttaaatccgaaaaccattttgccgaagctgtaatatcattatctgaaaattctccaaagaaaacagatatttcctgagcttttcctttagctcccaccgctttagtttcgatccacaaggcatgagcaaatagagtagggctggcaattaacattaaaagtaaaaatgttattgattgtaaagttttagatttcataatatgcaattaatgagttaataatttcgtatcacaaatgtaaagtttaatattagtttgacaatatttatttagaacaattatgaataataagatgtaaatctaatcttgtattttcttccgaatatcgtcagctggttttgtgtttccattttttaaatatgctttttccagtgcgagagatgcatttttacttttcggataatacttttctgcatatttaaagaaaataatggcctgttgcggtttttcaatatccagacaataattgccaatccaatccagataactttcggttgggagaaaggtaaaaccggtttgctgcgataatttggcatattgtttttctaccagggaaggatcaactacggcttgtttgacctgaaccagatgttcttcaaaaaggaagcgtaaaccatcatattcggccggaatgggaatggttccgtgatcttcattttcataaaatttaaaaccccagcgaaggtttttaggctttttatctttcagcaatttttcaaattttctgatgcctcttgccatatctgttgtggtgtcctgaggaatactttttttatcggccatggctaaataaatactgcgctgttcaaaattttttgtattaaaaagtgaatccgcttttttattcataagttcattatcccaccaaagacttggatcaataatgatataagaattaaacaattgagtatgatgcaacagaatatttacggccgttaatcctccaaaagaatgtccgtttaaaacattgtaacccgaagttctgtacttggagtctatgtaaggacgcagctcattttctaaaaaagtgatgaagtttctattgcctccgctttgttgaaacatcttcttttttttatcaaaaaacgcctgacgatttgcttcggtaggggtaagatctctggttcggttggtattggttattccaacaactatcatttgaggaattctggcataaggtcctcgcgcaagtgattgctgaagtccggtaaaggaatgaaaattactctcggcatctagtaaataaacaacaggatattttgcaggagcaaatttagtattgttgtaatcagggggaagataaacccagaagtttcgttcttcatttaatgctttagagaatagatgttgtttactgccaatagagatgctgtcttgcgagaaggaaggagtaaaccaaaaaaggcatagcaataaaattgtttttttcatttttaaactgattgtgtttttttctttttattctgacgtccgtaccaaattaaaaaacctgttacgggaagaaacatgcatacaagtcccacaagtaaagtcagtgtttttccaatccatccggcccaaaaaccaatatggagattcatcgttgtttcatcaatatctaaaccgttcattacttttacgggtatttcaaattcctggcctgtatagcgatttaacgcaaaagttttcccgttttgaacgcctttcagaccgatatcttcggccgctaccgcaaataaactggtaatactgtcttttgcggcaatcgataatttgacttgttcaatcgcttcgtcttttgcaaataatcgttctattattgggtttaatgctgcaaatgttttagtactgtcatattcaggttttatgtcccgaaatttggagtaagcgcgcggcatacctccaaatactttttgcgtcgttgagtttaaaggtttgttaacaataattaaaccggtaatagtaatcaataaggcgggcaataggttgtaaaatccgggaacattgtgtaaatcgtagttgagtcgtttaaaactggcattttttttaatagtaaagctttgcagtttggtagatcggttccatttttttggccaccataagataagtcctgtaattaattcgattagaaaaatccaaactgaaatttctataattaaatttccgatatctccaaaaggaatatgaccgctgtgaatgtgggcaatgacatagaagaaatcataagcctttccggaagttaaaactttgcctgtataaggatcgatccatgaaaattgcaaatcccggtctttggtcgacgaagccatcttaatggttctttcgggatctctgtaggtaataaaataactgggtttacgattgggcagttgtgttttgaaagcccttataatttcttccggaattagtttttgttcttttacttcagaaacatataaggaatcataagccaaaccatcaataatattatcgcaaaagataaataatactcctgtaagcgctacaataaatacaataattccggaagtaagtcctaaccataagtggagccaatgattcagtttactccatttgcttttttgtttgttttttttgattgtatttccagacatactgtaaaacgataaaaaccaagctacaatcgataagatatgatagcttggttataactaattaaaaagaattaaaatttaaaagtaagattagctactaattgtcttgttggcatcatattagcccaataatctgctgaccaatattctttgttcgcaagattattgacttttagccctaatctaaatttttgtttttcatagaagacactggcatctaatgtggtgtatccgtttgctgtaaaggtgttggcatcatttaaatagctatcactttgagtgtttccgccaaaaccaaaaccaactcctttggcttgtccgtctaagattttatagctaatccagaaattagcaacattagcaggagtagagtaaggtttttttccttcaagacttgggtttgctttggtgtattcactttggttataaccgtagcctacaataatgtgtaagcctctaaacggatttgcaatcagatcggcctcaaaacctttactgctttgcgttgcatcctgaacagaaaataaaggattgttaggatctgtacgcaatttgttttttactttaatatcatagtaactcaaagtaccgtttagttttcctcccagtaattcaatttttacaccaccttctaactggtttgcttcttcaggtttaaactctgtcaaaccatttggattgtctgcagttggtgctggcgacacattgctgaatccgttcatataatttccaaaaaccgaaactttgtctttaacaacctgatacactaaaccaaattttggagaaacagcattctgattgtactgtgcaattttgttttcgtaatgatcaaaacgcgcgctggccatagcaataaatcgatcggtaatattgatcacatccgaagcataaaaacttaatgttctaaaatctctggtgttaactacagttggcgccgtcatattagcgataagctgtttgtatttctccatattgataaaagcggcatttccgttgatggtaagggcaggatttgcaacagcggtatcataattattaatgagccatctgttatcatttgtactgatataggtgtaatcgatccctaaaagtaatcggtttttaaggcttccaatattgaaattcccgataaagttttgttgaatttgtgacgttttaaaggtactgttgatgttgtacaatcttcgttgtaaagtaataccagaattcgcagccgtattgatcagtaagaacaaataattggccttattgtcggtaaaagcattagaaaaattagtttgcgaaacccattgatctgacaattgataggtggcttttgcaaaaatattggtgttttttgcttccgattgtaaatcatctgtcgcatacgattttttgaaatcaaaatgtaaatcattcagactttttactggtggtgtaccgcttcctaaaccaatagaagttgaattacggtttccttgatacaattctaaatcaaagtcaaaggtcaaacggtcactggctttataagtaaaggaaggagccacgacaaaagtgtggcttttgccataatcctgccatgttttttggttgtctaaagcggcgttaatcctaaaaagcattgttttttcttcattaagaggtgtattaaaatcgatagttgtacgacttagagcccagcttccggtcgtataacttacttcacctttcataaagtcaaaaggctttttagtcactctgttgataagaccgccataagtggttaaggacgagccaaacaaggttgctgatggtcctttgattacttcgatactttccaggtttacaggatcactcatcgttacccagtttgtgttcattccgttacggattgatcccgctgccgatgaaccgctaaaaccacgcattcttaaacttaatccaactcctccagaacccacactttgcgtcacgttgtttaatcccggagccgagtttaaagcacttctgaaatcaacagctatttgttctacaaagagttctttgggaacgacggtatacacttgcgggttttcaagatttgcaatcggtaatctcgcgacatattcactttgttttttagcaaattttttggcggcagaaacaaccacaacttcctgtaattcttttaaagaagattctaattgaaatgaaaccgttgaggtttcatttgcactgactgtaatttgctgttttgatggaatatgtcccatcatattaatttcgatttcatatgttcctgtaggcacctggcttaaaataaaaacaccattttcatctgtgagggctgacttttttaattttggtattgtaatatttacggaggaggcaaggtggtcatctgaagtaattacagttccttttatagaacctgtactttgttgggaaaatgcatttgtaatgaaaaaacaaaccagaagaagcatgtaaatgggggtggttaacatcttttttacccttggtataataaaaagcatactatatttatttagattggttataaattgataattttacgcaaaagtaatatgttaataaaaacataattacctttcattaccttaatggttacctcttagcagggctgaaaacatcatgctattactatagctctttcagagcaaatgttaatctcatagatcagttttacaaaatcatctctttccttttttataatgtaacaaaatgagtcagaacaatgttctttgtcctacatctataaacaaaaaaatccacaaaattgaaaagtaaaatttcaattttgtggactaaatttattgttttctttttttaacccttgatccagttgattacttccggatctgttggcaatgttcttggtttaatcacttttaccaactcccctttttcgttaatcaggtatttttgaaagttccattctacttcagaatccttcaacccgtttttggatttttgtgttaagaatttgtatacttcacacatatcacttccttttacagaaactttatccatcattggaaaagttacaccataattttgctggcagaatgtctcaatctctttatttgttccaggctcctgctcagcaaaattattagcaggaaaacccacaattacgaatcctttatctttatactctttgtaaattgcttcaagatctttgtattgaggagttaaaccgcattttgatgccgtgttaacaatcatcacttttttcccttttagcgaagcaaaatcaaaagtgtctcctgataaatcttctaccttaaattgataaatggtttcttttgtcataagtttatctgttttagataatttctctttactggtttgtgcctgaattttagtaccgaacaaaagggcaatactacaagctataaatgctacttttttcattgtttatttttttataaaattagttaaattctcttctcaaaatcactttaaaatctttattttttgctaaacatacgttaaataaaaaaaaatgaagcctaacgttaatcagacgttaggcttccccccatacaaacaaatcaaaccatgaattaattgttattccctttttatatcgttatattaaaaatagttgatgccccggttttagtgctcatatttcaaaattccaatccctcaggcgtatcttttttaacggcttttatcttttattctgggcaagagttggactaccttcattttttctggaagtccgaagacatcaactgatctactaattcctaaataatgtattatcgtttattacaaactctgaattcttatgaacaagtcctttacgaaaatcacttttactaaatcccgccagcgacaaaacagtagtcaagccaacaatcagtattttcagtttatttaagctattcatgataaatatttttttatttattgagatttactttacgatttactctttctaaatattaattttcattactaactctaaaagcaaaaacgccattaaaaaactcaaaacctcttcatttccaggtttttgctattttcgacactataaattcgatgttataatagcatttacgcaattggattgcttttggttttaaaaaaatcaaaaaaaaatgatatttttttcaaaccccttactttcctaggtttaagactactaaaaaaattaaaatattcacgaaaaaaaattatctttatctcaggttagacataatgtcccttaaaattttgttccaacttaaaataccacacctatgagtcaagaagaattattagttttaatttacaagaaagacgaacgagcttttacccatttgtacgatatgtactcgaaaagtttgttttctgttattaatgttctcataaaaaatcgtgaagaagccgaagatgttttgcaggaagtttttgtcaaaatctggaaaaacatcgattcttataatgagagtaaaggtcggttttacacctggatccttaatattgcaagaaatacctccattgacaagttaagatccaaaaattttaataacagtcaaaaaaacctttcttcagataatttcgtaaatctgttagacgacagtaataaactcgttaatagaattgatactattggaatacaagaatttgtgaaaaaattaaaaccaaaatgtatcgagattattgatttattattttttaaaggatatacccaacaagaagcttcagaagaattggcaatgccattggggactatcaagacgcaaaacagaaactgtattaatgatctaagaaattatctaaaaatataatggaagcaaaagagtatatagaatcaggaattctggaactatacgtttacggtttattgaccgaaactgaaaatctggaaatagccgaactggctaagaaaaacccggaagttgatcaggaaattatttcgatagagaaagctattgtagctttatcatcaagtttttctccttttcactcggtagccaattttgagaagataaaagctcgtttagaactgaaacacggcaaagtagtcgacatgaaaccagcttcgaactggtcacaatatgtaggctgggctgcggcagtgttactgcttttaggctttggatatcaaactctggaattgacaaaaacgaaagaagctattgctactgttgggactgagaaaaacaaaattgaaaaagattacgctttcttagatcagcagaacaagcaaaccgaaaaaagtctgactatagtgagggacatcaaaaataccggtgtaacacttggcgggcaagccgtttctccaagttcatttgcaaaagtgtactggaacaaagacacaaaaacgacgtatattgatgctgccggcttaccaaaacctccaaaaggtatggtgtatcaggtttgggctttaaaattaagtcctgtactaacacctacgagtattggtttattgagcgattttgaaggaaactctcaaaaaatatttgctgtaaatcaaaccgattcagcagaagcttttggaattactttagaacctgccggaggaagcctgacgcctacaatggaacaattgtatactttaggaaaagtttaaaacaaaatacatcttatcacttaaaaaacgcatattcaatttaatatgcgttttttattattttcaatttgaaatatacctaaaaaattatgaatggaaatttacttttaagaactgcggtcgctattatactccttactcattcagttttcggaatgtttaataacggaatcaatgattttggaaatctttatttaaatcagattggcttcgctccttttggcgtttttctggcctggtctattaaattatcccatgtagcagcagccattcttctgcttattaacaaatacgttaaacctgcaggatttgtcactatcctcatattgataatgggaataatccttgttcattttcaggaaggctggtttgttgtaggcggtggaagaaacggtgccgaatataactttttactcattgtcgtactgctggcaattatgtatcccaatggcttaaaaaaactaaactaaatacctcccgtttagacataaaaaaagattcagcttaactgaatctttttttgtttattatactatttactattttttcttgcttttatagtatttacggtatttcggatacgttaaagctccaataactgaaatggttcctaacgaataccaaatccagcttaatgaatgtgcttctccagtggcatacgagtgtaaaccaactaagtgaaagtttactccataatatgtgaacaatattgatacaaaagcaaacatactcattaaattaaagaaccatttccctctaagtgccggtacaaaacgagcgtgaatcacaaaagcatataccataattgagattaaagcccatgtttcttttggatcccatccccaataacgtccccaactttcgttagcccactgtccgcccaggaagttaccaatcgttaacatgattaaaccaatcgtaatcgacatttcattgatataagtgatctctttgatatttaaatccattttagctttgttcttttcattggtaaagaaaatcaataccaaggctacaaaacctaaaatcattcctaaagcaaaaggaccataacttccaacaattactgctacgtgaatcattaaccaatacgagttcaataccggttgtaagtttgcaatttcaggatcaatccagttcatataagctgccattacgatcatggcagtcacaaaagcagatgaagctacggtaagtttcgattttcggtcaaaagccaatccaaagaacattgttgcccatgctacatatataatagactcataagcattactccatggagcgtgacccgagatgtaccagcgcgcaataagtcctaaagtgtgcagtgcaaacaatactcctaccagtatatggaaaccgttgatcgttatgcgaagccattttttctcaaaaaagatatttacaatagtaaacatcaacatcaagactgaaacggtaagataccagtacggcaattttttgaaaatatcgtatttgttataggttatttcggcatcaattttctcctcgcttggtcttaccttagccccaaactttttttggaaaccattaatactttctactaactgatcggctgttgtaaagttttttgaaattgagccattgtttaatgcactaaaatacattggcagaatttgcgttacataagtcgaatccattcctttaaatcctccctgttgtctttccagatacgaaacccatttgtgatttgggtcatttggaatagggaatattttcagaatactgccacttaaagcagattccatcagattcactcttttatcggtatctatgaaatctttctcaaactgatttggatttgctgctttataggcagcatctaaaaatggtgaaagtttataatttccgttagcatcaaaaaactgtacaaacgcagcacgtttagcttctttctctacgccaataatttttcgaatactgtcgtttccggatcttagatgaatcaaaggaatttgtatccaaacctgagcatactgcgtcatagacagaaatacctgatcagaattcattccgttgtaggtatcactctgacttacttttcgaagcaattcagatgaaaaagtattcaccggtttcattctacctcccgcatcctgaataatcaaacgtccaaatttagcggcatgtgattcgggagctttgtaaatggtgagtaaagagtctaactgtttctgacttggcggtgcagtaacatgattggcatgatcctttggatctgtgttgtgatcgtgattgtgtcccggtgtgtgtacatgcggagcctgagcaaaaccacttaaaccaatcattaaaactaaaatggtgattagtttttcttttttcttttttacgccttctagtttgcgtttcaaatcgccaaaacgggaatgtttggtaaacataatagccattaagcctatgtataaaagaaaatatcctaaataagtaatattagttccccagaaatcgtgatttaccgacaatactgttcctttttcgtccggatcaaatgaagattgaaaaaatcgatatcctttgtgatctaaaacgtggttcatataaatatcagcattaaatgtttctgttgaatcctgaacggttactttactttcaaaagaagagtagcttttttctgttcccggatattttgtagcgataaaatcgtttaactttattttgaaaggtaaaacataggctttacttccgtagaacaaactgtattcgatttttccaattttaaccgtctgaggctcccctacactacctttagagcctaaaagtctaacttgtttttcctgtccgtcaaccttaatttttacaatcaaagcatcatgatgtgatttggctttgtaatcgttattagattcataatctacaactcctttaacggcaggatcaggaaatacaattctgatatcaccaatactgtataaagaacgcatcatcaaaggctgtacattatctttgcttaccttaccttttaactgatcggccattcgcatgaactctccttcaaaaggtgtctgaatggtatatttatctcctgtggtattgatgttgattgcaccggcagttggtttgttcaacgcaaataatacattgtgaatattttgtacttcaccctctttcaggtaatgctcctcacgtccgccagaaccggcttctaccatttttaagtataacgttcctgtaggatccggttttatagtctctttagcccccatgatgtaattcacgtacgacacttcaaaaggagtctcatcgaattttccggaaagcgtaaaatcattattggtcacaggtgaaaacaataagcttttgtcaaaaactctgcgtttcatttctcccttatattctccatctgcaaaaacagtcaggaatgttttatcagaataaatttgattctcagcagccccttcacggataggcatcattccttcataactgatataacgcgtaataaaagctcctaaaagaataaaaataaaggcaaggtgaagtaataaagtggcccatttttcttttttatgcaattggtaacgtttgatgtttccaaagaaattgatcaaaaagaagaccattatcgcttcaaaccaccaggtattatagattaaaattcgggctgtatctgtgttgtacttactttcgataaaagttccaacacccattgcaattgcgaatgttaaaaaaagaacggccattaatcgtgtagaaaacaaaaaagagaatatttttttatccatttttaaggaattacattgtataaaagtggcacaaaaatacttaaaaatgttgatttgcaacggctgtaatttgttaataaaaaccaaatataaattagtaaatcaaatcctttctttaaaaaacgtgcgtttaattttacaaattcacaatcaagtttatgaatctgtttttttatgccacagattacgggattaaaacaggatttattcttttagcaaactacttttagaacagtcctttttaaataaatcaacagaatcattgcaatccgtataatctgcagctaaacttctttcatgcttattctctttaaaaaaaataatactaattttgcgctatgattcgaattacaataattggttccggaaatgttgcccagcatttgatcaaagctttctctaaaagtgaagcggtagaaattgtgcaggtattttcgagaaaaaaggaagcccttgcttctttggtaagttttgaaaaaatcacggatagttttgactctttacaagaagctgatctgtatataatcgcggtttcagacaatgcaatttcagaggtttcaaagcagttaccatttcaaaatcgtcttgtcgttcatacctcaggagcggctcccatcgaaactctggatataaaaaatcgtagaggtgttttttatccacttcaaaccttttctaaaaataccaccattgacttttcagtgattccggtttgtctggaggctgaaaatacctttgattttcgtgttttagaaaaagtagccaaaagcatttcaaagtcggtttaccctatcaattccgatcaaagaaaggcactgcacgttgcagcggtttttgtgaacaatttcaccaatcatctgtatcaaatcggacaggagatctgcaaagaacatcaggtgccatttgacgttttgaaacctttaatccaggaaacggctcaaaaaataaatacactagatccgattgacgctcaaaccggacctgcaaaacgcaaagattctactacaatcgaagcgcatttggagtatttaaaccctgaaaatcaaaagaatatttataaaatactaacacaatctatacaaaataatggcaaaaaattataaagaaataatgaatgacatcaccactttcgtttttgatgttgatggtgtgcttaccgatagttccgttttcgtaaccaatgaaggagagattcttcgtaccatgaatattcgtgatggttatgctatgaaagcagcagttgaaagcggttacaatgtttgcattatttcaggcggaagcaatgaaggtgttcgtgtacgtttgcgcaatttaggcattaatgacattcatttaggaactcccgataaagtagcaacttttgcagcatatactgaaacttataacattcaaccggaacaagttttgtatatgggcgatgatattccggattatcatgtgatgaaattagtaggtttaccaacttgtccacaagatgcaagtccggaaattaaaaacatttgccgctatatctcacacgtaaatggtggtaaaggtgccgcacgcgatgtgatcgaacaagtaatgaaagttcaggggaaatggatggaacattttaacggaaaacacgattaatgattgctgattgttgattttagattgcatttcacaaattacatttcacaaaaaaaaacttagctcctcagcctctcagaaccttagtacctataaaaaaatgaaattcctcaaactcattcgctacaaaaacctgctcctgctagcttttatgcaggtattatttcgctatgcctttctaaaacagcagaatattcctttagctttagcggactggcaatacggattattggttttaagtaccgttttactggcagcagcgggttatgtcattaataatatttacgatgttgcaacggatagtatcaataaacctgctgatgttgtaattggtaaaggaatttctgaaacaacagcctataacctttatattggacttaacattaccggagttgctattggattcctgttgtctaatatcattcttaggccaatgtttgcttcgctttttattttaattgcttcgctgctttacttttatgcaacgaccttaaaacaaattatgattctggggaattttgttgtggctttattactttctgtaagtgtatgggttattggaatcttcgacctttttcctgctacgaattctgaaaatcaggcacaaatggcgagttttttctccatcttaaccgattatgcaatatttgcttttatgattaattttactcgggaaatcgtgaaagatattgaggatcacaatggcgactataatcagggaatgaatacgttaccgatcgctattggaattagcagaactgcaaaaatagccctgggacttgcaataattccttttatatcttgtttactttacatcaaaacctattttgtggagaacaatctttttatcgctacattttatgcttttgcatttgttctggctcccttactgtattttattgtaaaaatatttggagcaaaaaatcaaaaagaattccaccatttaagtaccgttttgaaactaattttattcttcggaattttatcgattctcgttatcaccttaaatatcaaatacaatgcttaaagaaaagctaaaaaaatatacgttaattctagcttcgggatcgcctcgcagacagcagtttttcaaagacctggatcttgacttcgaaattaggttaaaggacattgaagaaatctatccgccggaactaaaagcagtcgaaatcacagattatctggcagcattaaaggccagtgcatttgaaggtgaactgaatgaaaatgaaatcctggtcaccagtgacaccatagtttggcatgagaataaagcactaggtaagccaaaaaatgctgaggaagcctttgctatgatcaagtcattatccaatactactcatgaagtgatcacctccgtttgttttaaaacaaacagctcttctactcttttgaatgatattacaaaggttacctttaatgatttatcagacgaggcaattttgtattacatcgaaaattacaaaccctacgacaaagccggtgcttatggcattcaggaatggtttggttttatggcagttgcaaaagtagaaggttcttacaccaatgttatgggattgccaacagccaaagtttatgaatatttgagtactttagtgtaaaaatttgtttatgttttctttcaaagaatatagccaggagatcttaactaccataattttgattctcgttctgatagcgttgcgtattattgttgcaaaactaattcgtcgttatgccagtacaagtcagttattagagcatcgtaccaatttagtgatcaagtacattcacttgctcatgaacatactggttatgattagcctgattgtaatttggggcgttgaaaccaaagatattttcataacggtttcttccattgctactgtaattggagtggctatgtttgctcagtggtctattttgagcaatataacttcgggaatgattttgtttttttcttttcctttccgaattggagataccatcaaaattcatgataaagactttccaatcgaagcagaaattgaagatataagcgcctttcatgtgaacttaaaaacaaaagacggcgaaaagattatttttcccaataatttactgctacaaaaaggaatttctataatgcctgtccaatacgaagaaaaggagttttttgattaagataagttcttgaatcttatactattttattcaacaaaatgcctcttttcctcaaagcgttagggatgggagcgatatccttttgcaatacccaaacatttttttgcatctcccaaatcttctatcgcaaaagatttagcggacagcccgacccggaggggaacgccataaacaaaattatcagtaacgaaatacgaatctaatgttttaaagagtgataataattgcttatattcatctataaattaacctttaagccgataaaaaaatataatgtctgtaaacacaaaaatagtcgtttttattctattatgcttttgcttacaaggcacttatgcacaggttaatccaccacagaaaaacgtaaaaactaaaaaagacagtaccgaagtttaccaaaaaattagaaactattcgaaaaagaataaatttacacaaacccttcataaactgttcttcaggggagacaatacacaaaaaaaagaagttttagtacaaaatgacaccaccgattttagcggtaaaatcattcggaacattaatattataacacttgatccgttcgggcattcggtaacagacagcaccaagatacccaaaaactggggagaaagaacaggaaacagactgcatttaaaaacaaaaaaaatagcaatctacaatctgctgctcttcaaaaaaaacaccccttacgacacttacaaagtacaggaaactgaacgtttgatacgatctcagcgatatgttacagctgtaagaattacgaataagataaccggagtagcttcagattcagttgacgtaacgattagagttctggactcctggagtacgattcccagatttgcggtctctggtaatcaggtgtcttttggtattaaagagaaagatttttttggaacaggacaacaattggactataaacacaccaaccgatttaaagatggccgtactgccaacgaagtaagctacaacattcctaatattaaaaatacttatataggaaccactttatactacaagattgatcttgataacaactacacgaaaagtatcaacattgaacgacttttttattctcctttgacccgatgggccggtggtatatatgcggggcagaactacaaaaaagattctttgcaggcacctgataaatcgtatgcatttcaaccctttaaaaataattttcacgatttctgggcagggcatgccagtaaagtaactcaagatgaagacggtatcaccaacctcgtggcaaccgcacgttttctgaacgttaattatagtcaaactccttctgaactctacgaccccactcgtttttactctgatgaaaagctgattttaagtggaattggtttgaaccgacgcaaatttataaaagacaattatatttttagaaatggccaaacagaggacgttcccattgggaaagtctacggaattactctggggtaccaatacaaaaacaaagaatggcgcccttatgcaggagcgcagttctcttttggaaattactaccgttggggattttttagtactaatctggaagccggtactttttttcatgattcaaaaacctatcaaacggctttctcgtttgaatctaactatttcacaaaactattcactatcggaaactggaaacttcgccagtttgtaaacccattcatcgttattggtgccaatcgcgaaaatatcattggagatcagcttaacattaatgaggcaaatggtttggctggatttaatactgctatatacggaacaaataaggtggttctgtcacttcaaacacaaacctattccccttatgctatactaggatttcgtatcaatcccttttttaattatggactcgctgtattaggaggtccaaatgatgctattggaagaaataaggcctaccaaaaaataactttgggtttgtcgataaataatgactacctggtattcagttccttccagatttcactgtcctactaccctactattccttttcagggagataatgtttttaaaaccaacacttttcaggcctctgattttggtttacaaagttttgaactggctaaaccacgaattgtagagtaccaatagtaaaaaatctatttttctttacttttttcaaaaaaaacagagactacaaaaataactaatattcaacactttagacaaatttcatttttaaaaaatcgtcaaaatgcatcatttatccgatgaaatacattgtgctttaatttttggcacagtatatgaatatcacaaaacaggatcaaccttaacctttaaattaaaaaaaatgaaaacaataaaattagcaattgcaggactttttctcctggttgcaaatgccacgcaagcgcaggtatctataaacgttaacataggaacacctccggcttggggaccggcgggatacgaagaaatagagtattattatctcccggacatcgaagcgtactatgacgttagagcttcacagtttctttattttggagggggtcgatgggttagaacaacctacttgccaaggcaatacagaaactatgatttatacggaggttataaagttgttttgaacgattatcacggcagaactccttatacttactttgaccgtcacagagtaaagtactacaaaggataccatggtgctccacaaagatgttacaagccaagaccaagatatggttatgacgaccgtcattatgataaaaaacgctacgaaaaacgccataaacatcatagagacgatgacgatgatgatgacgatcacgatggtcattacgggcgaagaagaggctaattattgctaaatcgttaattttcaatacaaaagagtatcaaaaatcatgatactctttttttatgcatgcatagtaaataccaaaaacgttaatttaataaatataatttaaaaataacaactaaaacgattgaaaaagttaaagtattcacaagcataatgagttacgacttacaaaatcgtaattttgcgcaaaatttaaacaaaaaaatagattttatgaagaagagcgtttatttattttcatggttagcgttgtccctttttacattttgtacgaatcatgacgactctgcaacgaatgaccaggctaaaaacaataacatcgaaatcaatagcgatattacggctttaaataagagacttgattacaccaattccggagtaatttcaattagcggttcatcagcttcaacagctaaactgttgaatagcgctcaatcttcggctaccggttttccattggttcaaattgcagaggttaatccaccaaaagacaatagcgggagaacgttacaggccagtcatgtagcggtaaacggaaactatgcttacgttgcttataccatgagtggtgaagcatattcaggagctattgatgttattgatgtctctgatccttataaacctaaattgatcacttcagccctaatcgccaataccgatattacctcgcttacctattcaaacggaaatctaattattggtgcagcggccgatatcgataaaaatccatcgctaaaaagccctgctgttgtcattaacatgcctttaagttcaggtatgctaacggataaatacacgatcactaatcttgaaggtcaagtaacaactgatgctgcttcgaattcaggttcttattttgcggtaaccggagaccagggaagtctgtttaaaatcaatgctgcctctaaaacaatctcaggaaaagttgccgtagaagatttacgttctgtagcaatcaacggagataaagtagtgacattgagcggaacaaaaggagtaaatatttataacgaatcaacactggcattacaaaaaagctttaccacatcaacagatgtaaaggcttcaaaaagaacgatagattttgatggtacaaaattattagtatcagaaggatataacggtttaagtgtttacgacatcaatagcggttcaaaactacagactattccgttagctgttgccggtgaagagaatgttaccaatgccttgtctgttaatgacggttatgcctttgtagccaatggtgccgcaggtttaaatgtatacaaaacgggggctcaacttggtttattgggaactgttgatatactaggttcgtcaaactatgtaaaatcaagtggtaattttatctatgtagccagtggaaaaggcggtttgaaaattatcaagatggaaaaaccaaacaccacttttgagggctgtacaggatatggtacttataaccagggacaaaatctgattctgaactccaatgaagttaaatcgtactccggtgctacctctattagctctgccattattaattccggtgcagtattaacgcactgtggttcaattacagttcaaaataatctaaccttaaacagtggaggaactttcaacatgaaaggaacattgtctcagggtaaatacggtcagtctaatccaacagaacttatcatcaacagcaatgcggtattacaagttgaaggtactgtagtgatttggggagatgttagattgaatagtggtgcgaagattaattttattggaaacagctcttctattaccatttatggaaaagtaaccaaaaacagcaatgttaccattacaggaaactataaagacacagaaaataaattgaaataatttactgcaatcctaagaaataccacgtgatctaatacattagatctattttctataaagctgtcagatttgatctggcagctttttttttgaatcaattttcttaaaaaagcaaatcaataaccaaacattaacatttcatttaaatactcttccatgatttaattagtatttttgaaacgctatcaaaaaacacctaaccttattatgcgaaaaattcagatacaaattcttctcttttttttatcaggcatttctctttcttttgcacaacaaccacaaaaaccaagttctgttgaaatttacaaccaaattaaaaaattaaactttttaggttcagtattgtacattgcagcgcatccggatgacgaaaatacccgcctaatttcttatatggccaatgaagtaaatgccagaacaggttatttgtctttaactcgcggtgatggtggacaaaatttaattggtccacaattacgcgaattgttaggtgttatcagaacacaagaactaatcgaagccagaaaaattgatggcggtgaacagtttttctcccgtgcaaatgattttggctattctaaaacccctgatgaaacattagaaatctggaataaagataaggtactggccgatatgatttggacgatccgaaaatttcaaccggatgtaatcatcaaccgatttgatcaccgttcaccaggtactacccacgggcatcatacatcatcggcgatgctaagtgtggaaagctttaaactcaccaatgatccgaaaacatatccggaacaattaaaatatgtaaaaccctggcaggtgaaacgtcagtttttcaatacatcctggtggttctacggaagtcaggaaaaatttaaagctgcaaataaatccaactttattcaattggaaaccggagtttactatccgggaattggaaagtcaaatcaggaaattgctgctttaagccgcagccgtcatcaatcccaaggttttggaagtaccggatcacgtggtgacgaaaccgaatttttagaactcatcaacggtgatcgtccgatagacaaaactaatttatttgaaggaattgatacttcatggaaccgcgttaaaaacggaaaacctgttggagatttaatctcttccatcatcgccaaatatgatttcagcaatccgtcagccagtattccggatctgattaaagcctatacgatgattgaggcattggaagacgatcactggaagtctgtaaaatcaatcgccatcaaaaatatcatcgcttcctgtaccggattgtatctggaagcggcagcaattgagcaggaagccactccgggaagcactattaaagttactctggaagccattaacagatcttcaatcgaaatgcaattaagcagtgtgacttcactaccggatcagaaaagcactccacaaaatatactgctgaaaaacaataacgatcaaaaaataagctaccaaattcagcttcctactacattagaatacacgcagccttattggttaaaagaaaaagcaactgaaggaatgtatacggtttctaatcaggaaaacattggtattcccgatattatcagacaagtcaaagtagtttttaatgtcaaaataaatggtgtagaaattccgttcgaacgcactgtaatctacaaatacaatgacggtgtaaagggagaaatgtacaatttccttgatattgttcctgaagttactacctcagttcttgaaaaagttttaatttttggaagtacgaaaagcaagttagtaccggtaaaagtacgtgcagggaaagacggtatcaaaggaaatctgcaattggaattaccaaaaagctggagcgtttctcctaaggaaattccttttactttagagaacaaaggaaacgaacagatcttttactttgaagttacaccacccgtaaatccggaagaaactgttgctaaaagtattgctgttgtcgatggtaaacgttttgacaaagatcagaccattatcgattacagtcatattaccaaacaaatggttttaaaaccggctgagtcaaaatgcatccgaattgagttaaaaacaaatggtgattcgatagcttatattatgggtgccggtgatgaagttccagaaagtttagcgcaaatgggatacaaagtcagtattattaaaccggaagaaatcacacccgaaaaactggactccttcaatgttgtaatgaccggagtacgtgcctataatactataaatgctttggcacacaaacaaaatatccttttcaactttgtgaaaagtggtaaaaacatgattgtacaatacaatacgtacggacaaacggtaaccgatcaaattgctccttatccgttaaaaatatcaaacgaccgtgtgaccgaagaaaatgctaaaatcacttttctggctcctaatcaccctattttaaacacaccaaacaaaatcagtactaaagattttgaaggctggaaacaagaacagggtttgtattatcctgatcagtatgatcctgcctttactcctattctttcttcacatgacaaaggagaatcggctaaaaatggtgctctattggtggcaccctacggaaaaggatactatatttacaccggtttaagcttctttagagaactgcccgaaggtgttgccggagcttatcgattgttatcgaatatgatttcattaaaacagcccatagaggctcccaaacaggaattaaaaaagtaaactattcccaatatggaaactaaaaaaataaaaaaatggaagaaaagctacacttatgttttagtagccaacgccatttacattctgatttttttcttaatcatgaaattatactcataacttatgcagctatttgattggatcgtactgatcgttactcttttattcatcgttgggtacggctcttggaaaaccaaaggaagtaaaaacgtcgaagattttattcttggaaacaacgaaactccctggtataccgtcggactatccgttatggccactcaagccagtgctattacttttctttcgactccaggacaggcctatcatgacggaatgggtttcatacagttctattttggactgccaattgccatgattgtcatttgtgtgacttttattcctctttatcataaaaataaagtatttaccgcttatgagtttctggaaaagagattcgatttaaaaacccgttccctggctgccattttatttttagttcagagaggtttaggaaccggtttaaccatttatgcaccggcgattattctctcggctcttttgggatggaatttaactctaatgaacattataattggggttatggttatcatttataccttttccggaggaacaaaggcagtaaacgtgactcagaagcagcaaatgtttgtaatcatgtcgggaatgtttatcacttttttcctgattctgcactacctgccaaacgatatgacttttaccagtgcgctgcacattgccggagccaacgataaaatgaatattgtcgatttctcttttgatccggaagaaaaatatactttctggagtggaatcactggtggttttttcctcgctcttgcctatttcggaaccgatcaatcgcaggttggtcgctatttatccggaaaatcagttcgtgaaagtcaaatgggactaatcatgaatggacttttaaaggttcctatgcaattctttattctgctgaccggagttatggtttttgtcttttttcagttcaatcccgttccgttaaatttcaatcccaacaataaaattgtcatcgaaaaatcaccttacaaagaggaataccatgctttagagaaaaaactaagcagtttatcggaagacaaaaaagtgatcaatttattatacatcgaccagctgaatcaggatttcgacaatccgattttacgaaaagaactggttacattgtccaataaagaaaaagaccttcgtgaccgtgccaaagaaatcatttccaaggctgatagcaacagtgaaactaatgataaagattacgtcttctttcattttattctcaattacttgccaaaaggactaattggcctacttttagccgtaattctttcagccgcaatgtcttcaacggcttcagggttaaatgctttagcgtcgacgactgccattgatatttacaaaagaaatctgaaaactgaaaaatcagagaaacattatctgaacgcgaccaagtttttcaccttattctggggaattgtagcgatactttttgcctgcgtgggaactttgttcgaaaacttaattcaattggtaaacattattggatctattttctacggaaccgttctgggcatctttttagtcggcttctatctccgacgcgtaaaggccaaagccatgttttatagcgctataatcagtcagcttaccatatttatcatttattattttatgattgcaatttacccgagcggtcaggaaaaactggggtacttatggttgaatttcattggagccattctgacaattgttctctcattattcatgcagctggccttttttagaaatgaaccggacgcagaggaaatcattatctagtaattctaaaacctgaatttagcatacagccttttcaagttaaaaaaattaaacccagacaattaaaaaataatcttctaaatttgattttggaagattattttttttttataagctgtagtggataatctggtaattcaaaaccatctaacaactaacattttacttcagctaattcttcgacaaaatttttatctttgagaaagcaaccgtttaaattccaacgctatgaaagatttgaaaaaatacagcaataagactaaagctgcttttattttattgattgtaatgcttctaattcttctggggaatttcaatacacttctaaattcaaaaaatgtaaatgaaaatattaacgcaatttacaaagaccgcttagtggttgcacattacatttttcaatactccaaagaactccattttataaaatcggaagccgaaaaactggatttaagcgatactatcaaaaaagacgaaatcattcagacattaaatattatccacaccattgacgatttatatgccaaaactgtactgaccgatacggaaaaacagtatttcgatgcttttttaaattcctgtaaagaaataaaccatcaggttgctgccaaaaactggaataaaattgccgtttcaagcaatgaagctctaaaaaccttagaagctttatcccaaattcagattcaggaaggaaaagcaaaactcgcgagtgccaatgcgatgtacagtaaaaacaatagtcttgggcaattgcaaattgcacttctcattattttgggcagcatcacagtttaccttttgattgtcaagaaaattaaaaaaagcattaaaattcctgagccgccaagtttgaactaattttaggatgtgttctcattaagaatgttacgaatttaatgcgctgagttttacggattcgtttcacaaaaatacagatttgtttttttagcattttaaccaatattgtgctcatttggcacaagaaactgtattactctttaaaatcaaacatttacaaacttttccccgataaattatgtcgctccttcggagctttttattgtattggataattttgttatggctataactatttcgctccttcggagcttgaccagaaattttccttcatgagaatgatacatgaaaaaatccgtgttaatccgcgttttcgtgaaacgaatccgctacatccgcgtctaaaaccgaggtatataactccatttcaatatcaatgtcagaactaatgctatctacttcaatttcctgtcctcttctttaattggcaagtcatttatactggcgaatcgcttctgcataagtccgttagcatcaaactcccagttttcatttccgtaggctctgaaccagtttccatccggagtctgatattcgtactcaaatcgcacggcaattctgttttctgtatgtgcccaatattcttttttgagtttgtaatgtctttccttctcccatttttgagtcaaaaagcgaatgatagcctctcttccattgacaaactgatctctgtttcgccattcgctatcaacggtatacgcttttgaaacacgctcaggatcctgactgttccaggcgtcttctgccaattgaattttttctaatgccgtttcataagtaaaaggcggcaatggtaacttctgttccataactataaaattaaagtttgaattattttcttggattgctcgataagatgatttgattggaataactgactttcgatgatacagctttcaaacagtaaataaatatgatctgccaaaagctcattttcaatctccgctttaaagtaatttcgtaagtctgatttatggctttgaatgacactcagtactttctcattatctgaaggtatttctgaaagtaggttcaaaaaactacatcctctgaaattttccttttgattcatggctattaaaaagtcaaaagaagccaaaacttttaatttagaatctttttgatctgaagtgaattgttccaactttgcaaaccaatattcatgacgccactctaaaaaggcgacacataaatcttcttttgatttaaaatgttgataaaaactcgcttttgccactttcgcttcttcaataatctgatttatacctgtggaattatatccttgggtatgaaacaaaacggaggctttatctaaaattcgttctttgggctgcatgtttggtttacgtttggaagtacaaatgtaaacaatttttaataaaaacagacaggtctgtctgttttaaataaatcttctattttttttaaccgcaaagaacgcgaaggtttacgcaaagcacgccagggtgaattctgaaatatttttttaagacttcccaagcaatactaaataaaaaatccaaatcccaaatcccaattgaacattggaatctggaatttggatttttaaaatttagaatttaataattcagtgaattattatctgctccactcagcgatactgtctttatttaattttacgtagtcttgatttttagcagcttctgcagcagcaagggaaattttagcggtttcaattgctccttttttatctccttgttttgcctgaatttgcgatttcaatcttaaaatgtaatatggtttatcagcgctaaggtctaatgatttatctatataagttctggcagtttcgatgtttccgtttgcctgaaacaagtaagttgcagctgaaaaataatcgtttgaacttggtcctcctaaaactttctcaatacttgccgtagccgtttttgcagttggtacttcaaactttaatgctacatgagaattttcccaggacatttctaaataaccgtagtttgggtctaaaccattaattccaatagtaaaagtctctaccggagttggcaatgcatcttcttttaccgtggttctcaaagctacataagcatcactccagttttcaggtaatccccagttatcagtagaaaggtaaaaaataacttcccagctttcaattttaggaatcgtataaattgcatatttaccttttttcaatgttttcccgtcgatcactacatcatcactaaaattaatgatcgtgttttcattagctccggttctccataattttccaaacggaaccagatttccaaatacagctcttcctctggcacccggtcttgaataggtaacttcaacgtcagtcaatccaacggtttgcttgatatatcctttaggactcgcttgcggagtttttatttgtgcttctgtagcaaaaggagccaaaacaatggctaatgcgataagtagttttttcattttgttagtttattttgttccctcaaatttacaaattcaattagcgaataaatgttaaatttaacttaattcaagcgtctaactgtgatattttttgcgcattcagctcactaaagtgattgataatcaaatcagcatctgataaatcctgtaatttcgaatgatgactgttataccctacacaatatacgccagcgccttttgctgctttcactccatttgtactgtcttcaatgataatacagttttcttttggagttttcgatagcgaagctgcatgcacaaaaatggccggatttggcttagattgcggaaaatcttcaccactgacaatatcggtaaaatactggtgcaaattgaatctggtaaacacacgttcaatcgttacttttgaagccgaagaagccaaaattaactgtattccgttagcgtatagatctttgatcaaatcttcaacaccttctaataagtacaaatcttctttggtatcaaaggcgtcattaaaaatatttctttttcgttggattaaatcttcaacttcgtgctcaattgttggaaaaagctcttttagagtctgaaaggtatttcgtgtcgaaaatccggtaaacgaagtgtacatctcttccgttactgtaatattcagttcggtaaattgtttgtaataagcataacgatgtacaggttcagtgtctacaatgacaccatccatatcgaagattactgtttttatcatttttttttagttactaaggttgtgaggggctaaggttctaagtttttttcttaaggtactaaggtactgagattctaaggttctgagttttttttctgaaacttatttactaaagacttagtacctcagaaccttagtatcttagaaccttttctactccttcttcagcaaataacgaatcaccgtttcggcaacatgcagaccaaatagacccggcatataactgttggttccgtagaatgattttttgaagtttttcccgtctgttagttttaaacttttctcgtcctgaatttcagaagagaaaactacttttagtttgtttattttttcggcttttagacgctttctgattgttttagagaagtaacagtttattgtttttgaaatatccgttacttttactttcgaagccagcatttttccgcccgcacccatactgctgataatttttactctcttacgttttgcagcaatgatcaggtttaattttggtgtgatactgtcgatacaatccaacacataatcaaactcagaagaaaccatctcaaaagctctttcaggagacaaaaactcctgtactctcgttagcttcaattccggattgatgtccatcaaacggtctccaacaatcgtaattttaggttgaccaacagtggagtgcaaagccggtaattgtctgttaatgtttgtaatatctactacatcgccatcaacaatagtcatacttcctactcctgctcttgccaaaaattcagctgcaaatgatccaactcctcctaaacctactaccaacacattggaattttgtaggttttgcaatccttctttcgtaaataaaagctcggctctttctgtccactctgccatatgttaatcttgttatttttgtttatttttttatttgtttcaggtttcagtttatttgtttcaggtttcaggttttacgttggtcagttcgagcgaagtcgagaactttttggaatttggattttctaaaattgaaattttaattctcattacttttcccaaaaacagcattgaaattatccgacacaatcttttgcaattctttaatggttaaacctttatattgcgatgccaattcataaacctgctctatactttcctcaatcgtatccgtttccaaaaaaaagcgatccttaggtatggtctgaaaaacagtttttaaatcgggatttcgcaaaagatattttccaaacgaaatataaaatccttctttaattagctgcgcggcaatctgatcgttttttgaaaaaccatgaacaatcatcggaaccgaaattttcattttcttcttcagtgcaatcacttcctggaaagcagcaacacaatggatgacaaccggtttttgatacttctccgccagtgccagttgcttttcaaaaacgattaattgctgttccaacggaatctcgattcgcttgtctaagccgcattcaccgatagccagacaattattcgattgtaatttttcttctataattttcaattcagcatcaatttgatcctcttttatgtaccaaggatgaattcctatggaataaaacggaatcgaagtatcaaactcctgtgggtattgattgaccaattccagcacattggcttgatttttaaagtgatgggtatgaaaattaaaaaattccatttaatgaaatgctttaactcccgctttgatttctacattcagatcgttttccaaaggaactatcggacatgaatatttatgattataagcgcaatacggattgtaggccatattaaaatcaaccgcaattgtgtttccttttggaacttttaaatcaatgtatcttcctccgatgtaacttcctttacccgaagttaaatctgaaaatggtaagaacagatgatctttatactccttcgttttcgaaagttctatgtttctgtaaacattcaatttaagggccactccgtcaattgtaaaatataaagttccgtatttgatgtattttggcgttcttgttccggtcgttttcatttcgaaaactttttcattttgtgctttctctaattttgcagtcacaaaatactttgcatttatgggataaaaatctaaacttttaaaggttttcagatcttctgccattaacggactcgtcttagcatcagcatattctgaatttattgtcttttgaaacttttcactttccttttgatcaaatttactttgtcccaagcaaaaattaatcgctaacaatactaaaaaaactatactttttttcatcttagaaattttgagcaaaaatagttcaaaagtaacaaagcagcaaccgctcatccatacaaagtttactaactttgttgcaaataacttatttataatgcttaaaaccgcttttagccgctacatcaataattttaaaggtttttcgagagaaatttggattcttgctattgttacttttatcaatcgtgccggaaccatggtgcttccatttttgtccaaatatttaaaagaagatttgcattttacgtacattcaggtaggctggattatggtggcttttggtttcggatcaatgttaggttcctggctgggtggaaaattaacagacaaaatcgggttttacaaaatcatgatttttagtttgtttactagtggagttttccttttccttattcaatatgttacccatttctggacgctttgcatcgcgatatttactttaatgactattgccgatatgtttcgcccggcgatgtatgtttcgcttggtgcctattctgaacccgaaaaccgaacgcgtgcccttagtttggtacgtcttgccgttaatttaggatttgccgcaggaccagcattaggaggtttgattattatgggtatggggtattcaggcttattttgggtagacggtgcatcgtgtatcatcgccatttcgatatttgccatactggttaaagagaagaaaaaaatactagacgaagataaaatcgaaaataccgaagttaaaaaatcagttcttcaggacaaaatcttttgggttttcttgtttgtgtgtttcgcgacggctatcatattcttccagctttttaccactttaccgctgtatcataacgaaaaatttggtttaagcgcgtttcagaccggactcttaatgacactaaacgggttgcttatttttactttggaaatgccaactgttgcttttatggagcggaaaggctttcctaaaataaaaattatcacacttggatcttccattatagccctgagtttctttttattattgattaatgtttgggcatggattctggtaatcagcatgattcttttctcgattggagaaattctcaacttccctttctcgaatgcttttgcactaagccgggctccacgcggacaagaaggccgttatatggcactttacaccatgagttttagtcttgcacatattgtgagtgcaaaagtaggcttcgaaatcatctcccggttcggataccaaatcaattggcttttcatggcttctattggagtttttgcaacgctatgctgcttttggattaaaaaggcattggtcagggagaaaatttcttaaaaacttactctccttatatcccttatcgtttatcgtttattaaacccgacaggtttcaaaaacctgtcgggtttgtttatatatgaaaacaatttttacaggtcaaagtccaataattctcttggatgttttcctaatccttttgccagatctaagagtgtagtaaaggataaatttcttttaccattttcaatatcacttattgtagctttgataagtctctcactatttaatacaaccatatcttgacttaaattttgctcgtttctaagcttccttatatgttctccaaatttttcaagtttctctgctttaaatttttccattactaatcttttaaacaaaaagcgtaattattttcttaaaaaatgttataagatcttataacaacaacctatttttttttttatattagctgaatatatattgatcattccaatcaatgatattcactaacaaatcaattataacctcctcctaaatagttaatcctattgcaattaatttgtaattttttagtatcatgcaaaaagaaaaacaaaattggcaaatcgcctcagagattgaattaatttacaaaaccaaagtaaaagcatcccagcgcccgcatataggttctgctagttcagtttataaattggctctgaaaatctgggaccccggaaaaattgagtttctcgagcagtttaaagtattcctgctcgacagatcaaataaagtattgggaatatttgaaatttcgtcaggaggaacaacaggggcttgtgttgaccttagattattgttcgtggcagcgctcaaaacaaatgcaacaggcattattataattcacaatcatccatcgggcaaaatacttccttcacttgctgacaaattgattactaaaaaaataaaagaggcaggtacaatcctggacattgttttagtagatcacttaataatcacttcagaatcttatttttcttttgcagataatgctattctctaatatttgccttccaaaatttcaaaaaagctatacaacccataatccatttagcttttattcagattctgttcaagctctattatacaagttttccttgacttcttttttaaactttaaatctacgagtacattttaagacgtccttaaaccatgttaaaaacctataaaacaacccattaaacctaattttaaactaactttaatccctctaagagacattcaaaacgtaatttttagttaaacaactatttttatagttgcgtaactagaaaaatagttgtaggtttgaattaaaattagaaaacatgcaaaagttaacgaacaaagaagaggaaatcatgcatattttatggaggcttaaaaaagcttttgtaaaggaagttcaggcagagatcacagaagatcaaccccactacaatactttatcgactatagtgcgcaatctggaagagaaaggatttgtggggcacaatgcttttggaaacacacatcaatattatccaatcattactttagaggcctacagtaaaaagtatatgaatacggcaattgacaactattttaatagttcgtataaaaatatggtttcattctttgctaaagaggagaaaatttcggcagcagaattacgtgaaattttagacatgatcgaaaatccaaaaggagaaaaataattgtttatggaagcacttttcttatttatcgcaaaatccggtggtttattaatattgttctattgtgcttattattttttattgcgcaaagaaaccttttttaacagcaacagatggtttttattggctggtttgattacctcagtagtgttgccttttttggtatactctaaaactgtttgggtaaaacctactcccgacacccatttgaattatactactgtttaccaaccgccgcttgtcgaaaataatgcttccttaatcaactggaatttggtgctgctttcagtctacgttatagtacttctaggattacttttaaaatttgcctacgacttttatagtctaaatgcagttctgaaaggaaagaaaatcacgcagcaagccgatttcaaattcatcgataccaacgaaaatattgctcctttctcttattttgattatatcgtgtacaactcatcaatgtacacgccttcggaattagaaagtattatcgagcatgaaaaggtgcatagtgagcaaaatcatactgcagatgttttactgtcaagaatattctgcgttctcttttggttcaacccgatcatgtggctgtataaaaaagcaattcttcaaaatctggaattcatcgccgatagtgaagctgcacgaaaaatctccgacaaaaaagcgtatcagtacacacttttaaaaattacaacacatgaaagctgtgttgcaatcaccaatcatttttatcaatcattaatcaaaaaacgaattgtcatgttaaacaaaaatcaatcaaagaaaagaaattcctggaaatttggagcaatagttccggcacttgcagcatttgtattagtatttcaaatcgaagtaattgccaaagaaaaacaacaaacggcaaaggtaatttcaggaaaaacagaatctgtagatgtttacaaaatcaaaaaaaatacgacagatgctgaattaaaggagatcaaagaaaaattaaaagcaattcataacattgaatttaaggcttctgagataaaaagaaatgctgatagtgaattaatatcaatcaaaattgatgttaaaaatggcaaacagcaagcacaatctgttcagacttcaggaaatgaagccattaaagattttggattaattgttacaacggatacgaatggcagcaaaaatgttggcattcagactgctgatgaaagtaataattctgaaagccacaaagaatccaaaaaagtaaaaaacaaaaaagtaatccttaaacaaactaaaaatgttaacactaattctggtactgacaaagaaattgctggcaatactcatacaaatactagcactactactgtaattacagatgataacggaacaaccagcgtatctacctcaaatagtgatggtaaaattattgtttcgacatcgggtaaaggcagcacaaaagggactaaacttaccatcgttgacggagttgaaatgcctgccaattataagcttgaagaccttaaaccaaaacatattaaaaaaatgagtgtctataaaggaagtgaagccactgctaaatatggagaaaaaggggctaatggtgtaatcgaaatcgaaacacatcaataggaaagcttaaaatgcaaaagctaaccaacaaagaagaggagatcatgcacattttatggaagcttcaaaaagcttttgtaaaagaaattcaggcagagatcacagaagatcaaccccattacaacactttatctacaattgttcgtaatctggaagaaaaaggctatgtaagtcatagcgcttttggaaatacacatcaatactatccactggtgagtattgaagaatatcgaaaagggtttatgcatactgctatcgataattattttaacagctcttataaaagtatggtttcattttttgccaaagaagaaaaaatctcggcagcagaattacgagaaatcttagtcatgatcgaaactccctaaaagaaaaaatagttagttatggaagcctttttcatttttatcgcaaaatcaagcggactggtaatattgttctattgtgcttattattttttattgcgcaaagaaaccttttttaacagcagccgatggttcttattagcaggattaattacctccgttgctttaccttttttagtttacaccaaaattgtatggatagaacccactcctattgttcaggctcctgtaatggctgcctcaaaaacaacaatcgctgcaatggattattcgaaagcatatctttcgcccgctgtagcagaagatccttttgaaatcaattggaattatgttgtactggctgtgtatggtatcggatttttggctttggtcataaaattcatgattgacttttatagtcttaattctgttctaaaagggaaaaaagtactgcagcaggccgattttaaatttgtcgatatcaacgaaaacattgctcctttttcttattttgattatatcgtatacaactcatcgatgtataccgcattagaattagagagtattatcgaacacgaaaaggtacatagtgaccaaaatcatacgatggatgttttaatctctagagtattttgcgtcttattttggttcaatccttttatctggctgtacaaaaaagcaattcttcaaaaccttgaatttattgccgacagtgaggctgccaaaataataaccgacaaaaaagcgtatcaatacacgcttttaaaaataacagcacacgaaagctgtgttgcaatcaccaatcatttttatcaatcattaatcaaaaaacgaattgtcatgttaaacaaaaatcaatcaaagaaatggaattactggaagtattatgccatcattccggcactagctgcttttatctttttattccaaattaaaaccatcgcacaagaaaaagaggctaaagaaggtagagaatcgaaagggatcatcgaaaaaaatgactcaaccgaggttattaaaatccaaaaaaacactacagatcaggaacttaaaaaaattacagccgatttaaaacaaaaacacaatgttgatgttgttatttcggatgtaaaaagaaacagtgaaaatgagctgaccgccattaaagtagacgtgaaaagacaaaatggaaaaacacaaaccattcacattgaaagcaataaagcgattaaaggctgtggaattgtggtatcaacccaagataacggttccaagaatatagcgttaataacggatgatgctccaagtaacccccgaatttttagaaatcaggttgcagagagagatgaaattaatgatacagatggtgaccctcttacacctccaacccctccgactccaccgtcatttcctaatggagcaatgccacaaatgcctacattaaatgttccaatgcctccaatgccaccaataagttcaggcagtaaagctgacatggctaattttaagaaagatatggccgaatatgaaaagaaagtaaaatctatcgaaccaagtattgccgcctacgaaaaacaattgaatgaattcttatcgcaaagagatgcaaattatgagaaagatatgcaaaagtatgaggctgcaatggataaattcagtgccgaaatggaaaaatttgccgagaacatagaagttaaatatggaaaagattctaaagagtacgacatcaatataaagcagtacgagcaagatatggaacatgtcaaaaaagacatgaaacagtaccaaaaagatgcaaaacaacatgaaagagatgcaaggcaaaaagaaagagacgcaagacagaaagaaagagacgcaagacagaaagaaagagaccaaagaagagatttagaaagcagaagatcataattcaggatttacttcaaaacaatataaaaacttaaaaatcaacaacaaagactttgcctgaccgcaaagtcttttttttatatctttgcaaaaaattaagcacttatgtacaaaattttagcccgaatcaataaaatactgttgccgagttttacgaaacaaggtctggacattacgaaagcaaaaaaatggcagatggccgttattggttatcgggcttatgttaccaaaagagctttaggatagtattctaaaaaatcttttcaaagctctacccaaccgtcttcggttatcggctatattggccgtttttctctccattacatttccatgaaaaataaagaattcaatatcccccctgtttacgctgtacttcttgcaattataagtgttcagtgtggggctgccattgcaaaaagtttattcccaactataggtgctgcgggaacagcttctttgcgaatcggaatttcggctgtcattttacttttagcatacagacccaatttaaaagcaattactccaaaacaatggagaattgttcttccttatggtttgacacttggcgctatgaatttagttttttatagtgcaatagaaagaatcccgattggtctggcagtgacacttgaatttataggtccattactggttgccatcgtcggctcgaaacgtttgcttgattattgctgggttgtactggcagcaattggaatagttttaatagctccatggtcaaatgaccaaatcgatcctataggtgttttatttgctctttttgcaggtgctttatgggctgcctatattgttctgggcggaaaagtttctaaaattatgcatggcggagaagcagttgccaccggaatgctattcggagccattttaattctaccgtttggtatctatgaaaacggattgataaatcttacccctaaacttttcgggatgggtgttgctctggctcttctatccagtgccattccatttacactcgaaatgaaagctctgggtcagctccctcctcgtacttttagtattttaatgagtttagagcccgctgcggcagctatctgcgcttttattttcttgcaggaacatttaaacttttatgaaattttagcagtactatgtgttgtaattgcttcggcaggatcaactttaactgcaaagaggtaaatcgcaaaaattcaaattccaaatcccaatttgaaagtcggaatttggaatttaagaattaagtctaagacttggtgtctaaaaattatattaactttttggcaataataccgtatcaattacgtgaattacaccatttgactgatttacatctgcaatagtaactttagcactgtttccgctttcgtcagtaaggtataaatcttttcctttcatccaggctgtcagtgtaccaccgttaaccgctttaatagttgctttccctttaccctctttaattgcttttgcaatacctgaagcattccattttcctgctactacatggtaagtcaggatattttgaagcatttttttgttttctggtttcaataatgtttcaacagttccttttggtaatttatcaaatgctgcatttgttggggcaaaaacagtaaacggtccctttccttcaagggtttccactaatccggctgcttttacagctgccactaatgtcgtgtggtcttttgaattaacggcattttcaataatatttttagtaggatacattgcggctcctccaaccattacggttttttgcgcaaatgatgtaaatccaaatcctaataccaggattgctacggctaaaaaatttctagttttcataattaatattttaggttataagctcatttacgcggtaatattagttttggttttaatacatcttcaaaaaaactaatattatactgaatatttttcaaaatccgctaaataacaaggctttagaaaagaaatatttttttaaaaaaaatcgaacttccttcccttttaacttaaaaacattaaccttaaatcattatttttttctaagaatcgtttgattcatgtaaagcccaattctgttttacgactgattgaatgataacccaattttcgatagctctcaaactgtgcttcatcaaaaaactgatctgctgtagattgttgtggaaaatcgggattagccaaagcatattctcgtatatcaataggctcatcccccgttaatgcagcttttatatagattaacgttccttttctttttatgcccggataagtaatttctcctttaataatatgctcctttgacttcccatctcgcttcgtaatatctttaaagtcttcaaaaataatctctacaccaaaatcaatacggcatcttctaatcgcattggccagaccttcacaggctatgtcctgatcttgttcaccatctcccaatatgatatgatgacaacgtcttctaatgagttcatacaatcccatattgtcaaaatgccctccatctgaaagacttacatactccatgttgatatcagatttaccaatcaaatcataaataatgtacaataaaccaaatctcggattagaatccttccaacgtttaagtctcgtattaccaatccatcgtcccaaacgaacattaaacatggttaacaaaaacgccataggtgctgaagaatgatatccccaattcggatttactgctgctcctgaaatagccatagcggtaccaatagttggtcctccatttacatttgaaaatctattcgtaggacgataaccgtattcgtatacgtgatccacgtaataagtagacgggcgtgttggactaaaatcatatccacaatacagaggtgtaaatacaaaggattccgctttacgatcctgacggtctaatgccgaaacaacagtagcattgagtgctgtattcaaaataggatatggaccaaaataaccgtcttcgaccttcattgatgacagcaatacatcatcgtctgtatcaaaaccagtaaatacatttgcagttttaatacgatcttccctgctacgggtggctcccataaaagctcttataagtcggttgcgataaaaatggtgaagggaaaactcattgactccaacacgccagctcagtaaaaatgtgataattaacaatcctatcgatattcccaaattacctaaaatattttcatccgttttcctgatcagctctataatagccgacccaataagaagcaccccaatcataaaaataaatggtacaatcttagcaaccttattcataatgcccataaacttctttggatcttcatcacctttagacgtaaatgctatttttacaccccaggcaactattgctgcccagcctccggtaataggtatcccaatcaaagcgtcctcaacattaaaattttcccataaatcgggcataattaatgctgtaaaacaaataagaatccaaaaaaacataaatcgatgtaaataagctcccgttcttccccaccactcccttcgataatcgggaaatacctttcccattatagccattcttgtgattatagaaagagtaaaaatttcgagaacaataggaatactaactaataattttactttagattcaaaaactgcgttgtcccataactttgattctataccaaatatgctttctaagccagtgcgaaattctaatgcaataaaattaatattcttccaaaataaataaaacaatagaccaacaacgacagaagccactgctgaagatatcactatcacagtccaatttttgagtccggtctcccacttctcactttccaatctccttctttctacttcagaggattcttttgccactacatttgccttacctaattctattaaatcgtatcttttaccataattcccctttaacgccactaaaattaatgctataaatgacggaagagatatcactaataataaccacttaataggattcccttcagggcaaacatcatacagatcggtattaattaaaaatgcactcatcagcaaagcacaaattacactccaactgatcagcaggtgtggcagtgcatcttttatccctgtcaaaataaatccattccatttttttgaaaaacgcgctacttttcttttttcacttattttataattagagctcatagcgcttgctgctataaatgctacaacggacagcatccctaaattccacaagaaaaatagtctggtattgtttgtatttacttttcgtaaaatttctccgagatactcccatcctttataaagatctaaaataaacgaaagaacggtgagtaaaaccaataacaacactgcctgattaacaagagtatttcttaaccacgttaatcctgatgtccaggcatccggagacattgtaccaacgtttggagaaagataattgctaaacattctgagccagcgtatcggacgcacttcatcggcaaacggatcagatgatttatccggacataactgatctgtcactttactaaaagacccggagcgtttaatccaggaggtgtaccatgttcctatgtaacctccgcctgatactgtcgagatataatctatcttatctaaaacacccaaacttgccaatttctggagtatcccaagattaaaggtagccgaacggattcctccgcctgaaaatgcaagtcctacaagcttcatatctaccgctttcaacattggatcgtgtatatttttctcttcaacagatttcttcggcaattctatatcaaaattttcatccgttgtttttgatgcctgccattcctcactcttttttttacgggctttgctaatctcgtgaagctcatcattaaaaaatgtttcaaatggcagaggaaattcgattctgcttctactgtctgaatctttatctaataattttctaagaagtaatttgtcatcagtaagatactgtaaagcatcctctctgtttttttcccaccacgctttatgattactaaaatcagccttgtttaagatactagagtaatcatattctttgtctatcgctgtgtaaaattgataaagacgtatctcataggctgaattgctctgacggcaaataacctgaactacttgtacaggcatgtatcgaagcactgctgccaattttttgcgttcctcaaacccttctccataaagcattgcccttatttgctgcctccaaaaaaaaggtaccctgaacaataaaagttcagatgatgcacttttatctttgtactttatagcaatattagaagcaagccattctaaaagatcataaacagtatctaaatatattcttatgagaatttcatcattacgattatccgggctatgccagactaagtccgaaatctcgtctatctggctcggagtcaactcttctattatcccataatcccgatcactgtttttgcccaaattactccaggaatttcttcccaaaaactctcgtgggaatgaattattagaattctttttcaaaatatcctgaaaaagagtcagataggatattgcttcggcggttagatcggttactatatccataataaatgaggtttaatgattaataaactagctagaaactaaaccagccgaaaaatcaatcgattagtcaattgattctctgtaagatactggaattttcagtactttaaaactgtactaaattacatcaaaaaattctgtacagagcaggtggaattacctgtttataacctatcattcttattattcaaaatcaattttaagcaactgtctttcattcaatatatttttataactttagaatcaaaaccaatttattatgcaaaatcttccaaaaaaagtaagaagtaaaaagttaaatgcaagagttgatttaaccgcaatggtgagtgtttcatttttgctgattatattttttatggttgttggtgaattgtctaaaccaaaaggtattgatttagctttacctgataatggggatatctcctgcggaccaattggttgtattgattccaatcgtatttatacaatcttattagatgatgatgacaaaattgttacctattcaggattattactttctcctcttgaaaacccaaaaagtagcgtttatggagaaagtggaattagaaaacaactatttgaaagaaataagaaaattacagaatattcgaccgcgcttggaaaacctaaaaacggtacaattgtaattataaaacccagcaaaaaaagcaattttaaaaatcttgttgatattctagacgaaatggcaattgccaaaattgaaacctattcgattgtaaatgaatatacccccgaagaagttaaactactagccttaaattaaaaacattctcaatcactaaaactatagctatgcaaaacctgccaaaaaaagtaagaagtaaaaagttaaatgcaaaagttgatttaactgctatggtaagtgtttcatttttgctgattatattttttatggttgttggtgaattgtctaaaccaaaagcgatggaatattatactccagattgtggtgatgagtgttttttaggaggttgttatagaccagatgaaaatcgttcaaccacagtgcttttagataaaaataacaaaattattgtctactccggattaatatatgctcccattgctgctccaaaagggatgcaatatggtaaaaatggaatcagaaaggaattgtttgacagaaataaaacagttctggaatactcagctgctttaggtaaacccggacgtggacttaccgttataataaaaccaagtaaaaaatccagttatggtaatttggttgatataatagacgaaatgaaaataattttacttcttcataaattaaaggtagggctttttgcttttcaatgaataagtcaagtttttttaattcataaaaaagacattcttcataagcactttctaaaagtcctggtcccaaagtctgatgaacttttaaagcacaattaaacacaattcgcgataattcattttctgacatgagttttaagttagaatattaaagctcaaatgtagtacaaaaaacaaaaaaaaagtaattttattcctacgttacttaaattgcgctctttgcgtaaaccttagcgaacctagcggttaaacttcttcttccaaatttaaataaaataaatctgaagctattccatccgttaaaaattttccttttaaagttggtctaagaatattgttttcaattgaaagcaaatcatcagttaagaatttttgagattgttttagtaaataattcaaatattccgatccgaattcgttttcaattctttccagagaaacgccccaaatggttcgtaaccctgtcataatatattcattataacgatctgaaacagtcagaatttccgtttcaataggaagttcattatgctgaattgcctttagatacaaagcgttattagccacattccagcctcttttgtggccatcaaaactatgagccgaaggaccaattccaatgtattttttgccgagccaataagcggaattgtttttggagaagtaaccttccttcccaaaattggataattcgtagtgaataaaaccatttttttcaagtgtgtccaccagaatcataaaatgactggaagccgcttcgtcttgtggttctgcaattttgccggtgtcaattagtttttttaaagctgttttgggttctaccgtcagggcataactcgaaatgtggggaatcccgaaggacaacgctgtttcaatattttttttccacatttcgtcagtcagaccgggaattccatagatcagatcgagtgaaatgttatcgaaatatttggtcgcttctttcaaacaatttatcgcttccaccgaattatgagcacggttcatcatctttaaatcttcttcataaaaagactgaattccaatgcttaaacggtttatagggctttttgataattctaaaattcgctcaggagataaatcgtcgggatttgcttcgagtgtgatctccggattttctataacattgtaatggttgtaaatggtctcgattaaaaagttgatttcggcattacttaaaacggatggggtcccgccgccaaaataaatagtttcaatttgattgtcgcttcgagcggagtccgtaaggttcaattcatcttttcgcaggataatttctttagctaaagccaaaaccatctcgtctttctttttcattgaagtcgaaaaatgaaagtcgcaatagtggcaagcctgcttgcaaaaagggatatggatgtagatgccgctcattaattagataatgtgtcaattagaaaattagataatgtgaaagtgaaataatttgataatttaatattttcaatataagaaattatctcattatcaaattggcacatttcctcatttacggattttgtcttcattctgtttcacaaaagcatcccaacccgaataacttttaccggcaataactttaccggaattaaaatgatgacaaacggcagccgccaaaccatctgttgagtcgaggtttttgggtaattctttcaggccaagaagctgctggagcatttttgccacctgttctttactggcatttccgtttccggtaatcgccattttgatctttttaggttcgtactcagtgatgggaatccctctcgagagtcccgctgccattgcgacaccctgtgcacgccctaatttcagcatcgattgaacgtttttgccgaagaaaggagcctcaatcgctatttcgtcaggatggtgcgtttctataagttcgatagtacgctcaaatatgattcttaatttttggtaatgattgtcgtatttggataattgcagttcgttaagctgcagaaattccatttttttattggtgactttaattaatccgaaacccatgattgtcgttccggggtcaatacctaatatgatgcgttcttttgtcaagtttttttgtttcaggtttgatgtttcacgttcaaagtttatcagtttagatgtccctttgttagtattacattttgttctttattcagtatttctattgattgacaaatactgttgtataaattccaaaacttatcttcgaaatcatcttcttgttttaatatattttcggtttcagaattatcttcgttatttaaaattgtaccatgactttcataataggatgtcaaaagagttccgttatctgctaaaacccatctgcaagtggcgatccatggatcaacgaaaaaataataaacttttgtgttaagctctttcgaaagaaataaggtcatttgctttgtttcttcaaaatcccaaacattccatattagataactccattcattaatttggtcaaataacataaatggttttgtggtattgtttgaactttcatcagataaaaaagaccaatcaaatttttcatcaaactctataacttcggtatttgatgcttttaaaacctctaatatggagctttttgttacattttctatgcaaaaatgatgatttaccagtgagctaattaaatttcgttttttatttcctgattctaacatttcattttccaattttcaaattgccacattttcaaattgattacttttgcgacatgatttcaattcctcacaaagctaagcaattccttgttcttctaatcaaacttttgattgtaggtggtgcattttactttatttataatcagttggcgcataatgatcaattggactggcaaaaattcattgtgctgtttcgtaaaaatcagtctgttttaggaattgggtttatattgcttttgagtgttttgaaccgctatttcgagatcctgaaatggcaaaatctggctaaagtaattcatgagatttctttaggagaagccacaaaacaggtattggcagctttaacagccggaatttttacgccaaacggagtaggagagtacgccggaaaagccttgtattattcgaaatcagacgctaaaaaagtaattttcttaaacctgatctgcaacggaatccagatgatcttaacggtaatttttggggtttttgggttattgtattttaatgccaagtatgagattattacaactcaaacggttgctgttttgttcgggggctttgtgttgctattggttgttttgttttccgtgaagaaaataaaaattaaaggatattcgatcgagaaattagtacataagattaacgaaatcccaaaatcagttcaccgtaagaatattgttttaggaattttacggtatttggtcttttcacatcagtattactttttgttcttggcttttgatgtcgatttgccttattttactttaattgctaccattgcggtagtttacttcctggcttcgtcactgcctacttttcagtttctggattttgcggtaaaaggaagtgttgcgatttatttctttggaattttaggggtaaacgagtggattgtagtttttatcagcacgctgatgtggtttcttaatgtggttttaccggttgttataggagcttattatgtactaaattttaagaccaaaacagcagaatgatttgggttttgtctaccatattaggtatttatttgattgccattggtttgcttatttatggattttttaaagtaagaaagtaccaaaatgcaggtttaaaacctcaaacaaactttacgattatagttccgtttcgggatgaagaagaaaacttacctaatcttttgcggtgtttttcagaactgaattaccctaatgatttgtttgaagttattttggtagatgatagttctaagaagaaatttcaagtttcaaatttcaaatttcgcatttcacaaatcgacaatatccgggtttcgaattctcctaaaaaagatgctatctcgacggccatgcaattggtgaaaacggattgggttgttactacagatgctgattgcctggtgcctgagaattggttgttgacatttgataattatattcagcaaaataaggtttcgatgctggcaggagctgtaacgtacgaatgcgagaactcttttttgcaccattttcagcaattggatttaacgagtctgcaaggtgctactattggaagttttggacttcaaagtgcttttatgtgcaacggagccaattttgcgtatactaaatcgctgtttgaagatttaaatggatttgaagggaatagcaaaattgccagtggagatgatgtgtttttactgcaaaaagcggttggtttatttcctgatgaagtacattatttaaaggcaacggatgcaattgtaagcacaaaaccaacggaggactggaagaccttattttatcaaagggttcgttgggcggccaaaacaagttcgtatcaaagcagctttggaaagcgattaggtcttattgttttcttgggaaacctgagttttgtagttgggttttgtagtgttgttttttcgattttgccttattacttctttgttttgttggctttttcaaaattcacaatcgattatatgttactctatgctacgaaccgttttttagtgaaagacaaaataaaaagtttgttcttaagtaatttgttatatccttttttcagttcggctgtggctttgtacagcttgtttggctcttatgaatggaagggaagaaagtttacgaaataaaatcttctactactaataggtaaaacaactattttttttcttttgccttgagaataacaggtaagataaattgtgtttttaccggaattccgcgtttaagtgccggatttactttagggaaatcaaccaggcgggcatgtagaatactatcaattttaatagtgtcgtaggcaacagaatctttaggaaattgaggttcgaatttcatggttgagtttggaaaaacggtcactttcacttcgatggtgtcaagttcgggatagagtatggaaagggtgtcaatatccagtttttcctgaataagttgtgccattacctcaaaaaaacattgttgacgctgctttttatcggtaattttttcgcaattggcaacagatggaaactcatcaacttctttccagttaatcgattttagttctttttgaagtaattctttttcagacgggaccttcttctcaaaatattgacaagaatggaaaaatagaattacgaataaaaggaaaagcttcttcaagactttgatgttggattgaataaataaattagaatataaaaatacaattattttttttgagaagctttgaattgcaaataatcttcataattttccgacagccatttttctttgttttttgccgcaacttctttttcttcaggatataaagaagctagtcggtcagaaaaagcagcaatacgaacggtgtaattgtagtactccgttttgcttaatacaatatttggatcattttttcgattaaaatattcgaagaataaagtattaaaatctttcatcgaaaagttgagcacttttttcttattacttttataaatgctgtcttgcagaagtctgtcgtttattgagagagttttagtttgggcatgcaaattgctattgatgacaaggatcagaaaactacaggagataaattgcaaaaattgacgcattaacttgttcctttagaaagtttgtagatcaaatttacaaaaaaagatatggatttactattgttgttgctgggatttatatgcatgattgttgggatttttggcagttttctgcctgtattacccggattgtcgtcttgctgggtggggctgttactgctgtacctgaccaaagcagttgagaacaattattgggttttaggcattaccctttttctaacgattgtaattacgattcttgattatatcatcccggcaaaagggactaaaaaatttggagggagttcgtatggcgtgtggggaactaacattggtttaattgtaggtattattgctcctattccttttggagttattattgggccttttgtaggggctttggttggagagttgatttatgattcgaccaatcatcaaagagcactgaaagcggcaacaggatctgttttaggctttttggcttcgagttttgtgaattttttatgctgcattattttcctgggtatttttattagcattgtctggcaaaatcgcttattactgttttaaatcgcgtatttatccttaagctttttcttattttttaattttttatcaaaaaaatgtgatttttttttgagaggatttttctttgttttgataacgaatgggttatgtttactggaggttggggatttttatgtttaacaactgtttaggcaataattcaccatttaacttattttttggaaatgttagaatattttatatttttatcctgataaacgataaaaagcctcacttcgtcgattatttttaatggatttaaataatttcaaataagttaaatatgactcctaacctacaaattgaacttagacgttttatttcttctaatgttgtttcaaagttgaacaagttttattttgaaaatgatgcatttttaattaaaggaattgatgtttctataggtacggttttaatggggttgtacaacagggcggaggagtcggatttttacaaaggaattacttcaatgatacaggacgattccactttctatcaggaagtcgattttacatcaggacgtattttatccgttgacgattgttatcgattagaagggaatagtttgctgaaagaaatttttaccaataaaaaaggcaggatttctgaaatgatttcaaacgaagtcggaatcaaaagtgaaacagcccgagagattcttaacttttctgctttactagtcgtctcttatcttaagaataatatccaaatagtagagagtttaaaattgcttttagaagatcaaaaaagagatattttaaacagtattcctcccggaatcaaaattatcctgggtttttcctgttacgaaacagtagaagaaaaaaaccaatctataggaagatctatttttactttattcggtcataactttttcagcttctaaaaaaaaatcccgtcttacagcgtaaaacaggatttgtatttaaatcaatttgagtagttttttatacgtttttcaagttgataacttcttggtcagttaaaaaacgccagttacctctcggtaaattctttttagttaaacctgcaaacgatacacggtcaatacgtaatacatcatagtcaaagttttcgaaaatagcacgtactacttttacattcgaagaacgtaatttaagacctacttcgctttttgcttctttttcaatataactgatttcttctacgaaaacacggtgtccgtcaagaactaagcctttacttattttttctaaatcttcaaatttcaagtttttgtctaaagaaacctgataaatcttagatgatttttgatttggtaaagtaaatttacgaatcatgtccgtgtcgttagtaaacagcaataaaccggttgtgtttttgtccattcttccaatcggagcaatttttgccgttgtagaaccacgaactaactctaaaacattacgatattcctgaccttcgtcaagagcagtggtaaagtttttaggtttgtttaataagatgtattctttcttttcaggagtcaaagtaacgccgtcgaaatttacaacatcatttaattttactaaataacccatttcagttaccggaactccatttactttaacatttccggactgaatgtatatatcggcatcacgacgagaacaaacacctgaatttgagatgtatttgtttaaacgaatttcgtctgaagctttttgtctttttggagcctgattctgttttttaattttctgcgccttttcttcttcggcagccttcacagcaggttttacctttttcggcccttgagcacgttttgccataggaggttttggcttgttagagtttggtcttgagctatttggtctcgaaccgcctcttttattattgccttccttattgttcataaattctgtaatttgtgcaaagatagtttattcttgctaaataatcctaagttcattgttcttagattgatagctgttgttttttagagttataagagtgttacaattgtctttttttaagcattttgaaagttacactatgaagattttacaatgtgaaagcaaagcaaagggcaaaaatgagctattaaaccgttaagattttagtaataaattttttccatgccataagacagttggattaattaatacgatgcaaaatactcccgaaacaatcaggaattttaagacattgtgtaatagtaaaaattgttccttagagtttgatttccataaataaatcaggaaaaatagcaatacgccaaaacagacataaaagtaaatgtccatataacccacatcgtaaatgttgattaaaatgtaaaccggaaccactgtcaggatcgttaaaactgtaatgatttgtttggaaaccgtttcgttgtaaagaattgggattgttctgtaattgttagctaaatcacctttgagattttccagatcttttatcatttcccgaatgagcaacaataaaaacaagaaaatcgcgtgagatgaaataaccatgaaatgactcatgtgattctcgatttcttcaaacgaaattttgttgtagaaatataacaggatagcaaagaatggaactactgccaggaaggccgcacagagattaccaacaatagggtatttttttattttatgagagtagagccaaatgaggaaaatgtatgccgaaaagaatagaaaagcacgccaggatacaatcagcgccattaaggccgcaatgaagttgagtgtaaaataaacggatagttttgttttttgactgactaatctgtctaacattgatttgttaggtctgttgattaaatctttttggctgtcgtagaaattattgataatataacctgaagcaatagtgattgcggaagcaaaaacgattaaaaataaattgaaatccaacaaaatatccagtgctcttttttccggtgccagtataaaaatagaggataagtattgagccaaaacaataatcgggatgttatagcctctcactacggagaacaaactaacaattttcattactaaaagtttgtgctgtctgcttaacattttttgagtttggtttcaggttttaattctagacttgtttttaggttctccttctgcaaaacataaataggctccctgcgaatttgaagcatcaggagccgaaaaggaaaagttgtgatcctgttgcagagcagataaagacaatgacagcagcttcttcaataatcaatgctgaaaactttactttcgtgtagtgaacagtgattttttgaacaatattaaatcctttttctaaaagtatcgctaataaaattaaaggtgttaaaaatagaattcctcctgaaaaagtcgctttgataatctttaaaatacgattcataagtttaaacttttaaggtctatttaaagaaagcgagttttaaaagacaggatttagaattgataaacgacttctaatttataatcttttaaagatgctttggcacgttccaaatcctcggtaaagcccagaatataaccgcctcctcctgaaccgcaaagtttcagatagtagtcgttcgtatcaattccgttttgccagatcccatgaaattgttccggaatcattggtttgaagttgtttaaaacgacttttgatagctttttagtattggtaaacaacgatttcatgtcaccatgtaaaaagttttctacacaagcatcggtatattttacaaactgatttttaagcatagtacggaagcctttgtctttcaggctttccatgaaaatgttaaccatcggagcggtttcgcctacaattcctgaatctaataaaaatacagccccttttccatcaaaactctgagttggaattccggttgcttcaatgttatctttcgaattgattaaaataggaatgcttaaataactgtttaaaggatctaaaccagagctctttccgtggaagaaactttccatttgagcgaaaatattctttaattgtaatagtttttcgcgagtcagattttctaaaacggtgatcttatgagtagcatatttgtcataaattgcagcaacaagtgcaccactgcttcccactccgtatccttgtggaatactggaatcgaaatacattccggtttctacatcattctttaaagccgtcaaatcaaaagcaaccaaatccggctgttctgtttgtaaagtttcaagataagctgcaaaacgttttaagcttgcgttggatgccattgcttctgccgaaggttcttcggtttttttcaaagcaccgttgtaaaaattataaggaatagaaagtcctttagagtcgcggatgattccgtattctccaaagagtaatatttttgagtaaaataagggtcctttcatgattattttatgtctttctttattttatttgggtcttgtctggtgtcgagaaaagcaattatttcaattcttttattattgaacttatagaacaatgttgattgttttgtaacgacacatttatgtactttcctattgctttcagatattggaaaagcttcagggtttacttgaataatttttacggtttgatatagtttagttgcaaattttttccgaattctctctgaccattttacttctaaatattctagaagattttcaatagctgattgagcgaggtccgaaattataatttgcctcattctttcaaatgtgtttctttatcatcgtttcaaaatcggaaaattcaccattctgaatttgttcttctcctaatttaatagctgctttttgagcatctgtcaaatcatcccaccaatcttttttctttttggtcaacaattcgatgaccgccttaatgattgaaggatcatttgtttcttgaagcatattgattgcttcgcgtttctctaattgaatgtccataatcaaaattttaattaaagatacgtaaaattacaatgcaattgcaccatctccaatttcgtcgcaaatgtactgaccattctgacaaaatacaactaattcgtcctgaataaattgtagcactttatcgctaacgttttcgggatagagaacatgaacatttgctccggcatcaagtgtaaagcaaaccggaatctgagtctcatttcggaacttccagatggcattaatgatttgcaaggtgttcggtttcattaaaatatagtagggcatagaagtcatcatcatggcatgtaatgtcaatgcttcactttcaactacttttataaattcgttcagattaccgctttcaaaaatggtaattaactgatccagattttcatgtgcctgagcaaaacgtctttcggcatagggatgattgtgcattaaatcatgtccaacagtactggaaacttgtttttcacctttatcaaccagtaaaatggtatcctgatagttgttgaaattttcgtgaacggtataagggaattcaaccccatataaatccgaacttcctttaatatttgcctgatttccccaagctaccagatttccttttacacttctgcaggcacttccggatcccaaacgggctaaaaaagaagctttctggtaaaaatagccttctgtcatttcaggatttaatactttctctaaattcataaagttcattgctaaagctgccattccagaagccgatgaagcaattcctgaactgtgtggaaaggtattttgagtatcgatagtaaaatgatactctttcagaaaaggtaaatagatttcaattcgttccagaaacttttgaatttttggtttgaagtcttcttttggttttccttcaaaaagtaaatcaaaggagaaattacttgcgggagaactttctcttttcgaaaaagcaagcttagtaatcgttttacaatttttaagggtaaaacttactgaaggatttgccggaatctgattgtcttttttcccccagtattttactaacgcaatattgctgggtgcgctccattcaaaatttcctttttcgatggatgaagtataagtattaggaataaaatcagctgctgtaaacatgaactataaaattttggcaaagatagtttttaaaatattgcgtcatataagttctgttggaaaatgtaagtcaagcaccaactaataacaaactgaagggcagttataggatttacgccttctttttgattatttttggtgaaaaatcatagtaaaatgaacaaggcagccaaaattgcaattgcattagttatttgtttaatggtagggtattctgcaagtatagtgacaagaccaagtgttgaaacatggtatcctactcttataaaacctccttttaatccgcctaattggatttttatgccggtttggacactgctttatattttgatggcggttgcagcaggactggtttgggataaaataaaagagcagaaagagacggtgaaaatggccttaggtttcttcataattcagctgacgttaaacgcgatctggtcttacttgttcttcgaattaaagaacccaatgcttgccctaattgaaattgtacttttatggctgatgatttatgaaacgtatctgaaattcattaaaatcaataaaattgccggatatgtattgattccgtatatggtttgggtagcatttgctgcagttttaaatgccagtatctggtggttgaattgataggttatagtttcaggttacaagctttttttgtttcaagttaattctatgataaatctgctttatgaataaatttaagctctccttagtagttttgtttttaatctcatttaagtgttttgcctgcttgaatggtgaaacgaaaacattaaaaaacggatatttaatttacattgattataaaggaattgttcctcatggtcataattttgacgcaggagtttcttcccagttgctttttgaactggatagtatttataaaaagacaaaggatatagattatttgtctgataaagggtatgttttaattgttttaaaaaagtatgaggaagcattaaaattatatctaagtattgaaaagattaagccaaatcgatattctacagcatcgaatcttggaacgctttacgaattaatgggagaaaatgagaaagcttatgattggattaagaagtcaattcagattaattccgaatctcatgaaggatcagaatggatacatttgaaaatattagagactaagattaagaatttaaacaatgtttcgggggaatttttaataggtacaagttttggcacagatgaaatccctaaaagtaatttgtcaaaatctgaattagagagattaagtaaatctatttattatcagttgaatgaacgaataacctttctaaaaccaaaggacagaataatttcgatcttgcttttcgaattggctaatattgtcaaaataattgagaagaataaaacagcaattgaaatatatgaacaagcaaaagagtatggattagatgatgaattgattaataaaaggctgcaatattgctacaaattcgagattgattattgtgaggatcgaaatttaagactttatgatgcaaatcatgatttaagagataaaatgaatgggatcgatagagattatgtaaatcaaatcgaaatactgttaattattctatcaattgttttggcaattttaataattgctttggccattttttatactaaatggaagagtttaagagattacatttttctgaatgatttaaaaacggatgcttagttctgactctccgtttttagctttttgaacatctcatttttggcatacatgaaatccattgtaattagaatgttgctgttttccaaaaggtttttagatctgggatcagcatcacaaaattcaataaacagctctttctcttctggttttaagtttaaatttttgataaaaaaatcatctggaattgatgctgctacgagttttttgaaatcagttttcggagttttagttttgacaggtttatcatcttctgttttaaataaactaactaaatctttgccaagtcttgcaaaatcagtcccgtttgtaatagttccgttgtaaacaccagtatatttttctaaagagccagcatcttttgccaattttatatcgtctatattttgctgagaggtttttacccggtcaaatttgatattggtaataacgacttcgtttaattcttccggttttataaccatatttacggtgatgttgttctgatcgatgttttcttgggttatttttagcctggtgaaaaaataatctttggaaaaaaacagtaaactatcccggcttttgactaaaattgaaaactctcctaaattattggtcctcgtacttgttttggctgttttgttaatgacttctactttatttagcggattgttattggacatcacttttccatgaagtactttttctgattgtgaaacagacagctgataggtgaaaaaggaaatggtggtaagtagttttactttcatttgagacgttttgtaatcttttttaatttttagggtctgttttcagtttctggaattcgatatttttgatatataaaaaatccattgtggtcagtatatttggatcttgtaaaagcattttagatttcggatcaacatcgcagaatttaataaaaatttctttttcttctggttttagctttaaatcgttggtaaaaaatccgggaggacaggaagcagcgaccagttttttaaagcgctcgtcattttcaatctttttctttttcttagttggaagagctatattgtagttaagcgcatttttgattcttccgtcattaatattcaggtagcgttgaattaagtcattggcctgtttgtcgtttttgacttggtttgcagcttctacactataagtgattttgggaagtttgttgtttatgataacaatattatctaattcttcggttattgggatcatgttaataatgatcatattgctttctatttctttggcagtaagctttattcttttgaaccaaaagtttttagagaaaaagataaggctgtcttgggcttttgcaagtatggaaaactctcctaaatgatttgttgttgtactggtttgtgcagttttattgattacttctatatttttaagtaagattgtttcggattgtacttttccttttagaagtttttcggtttgagaaatagaaagctgataggtgaaaaaggaaatggtggtaagtagttttactttcatctaatggtatttagttgaaagtaaaattattagaatagtcttaacgaaaacttagtaaatatgtaaaatcttgttaattgattaatggcagttttcagtcccagtctcagttttcagtctcagttttcagtctcagattaactgtgactgcaaactgcgactgtacactattttaaatagcattcgccaaaataaacccgcttgtccaggcattttgaaaattaaatcctcctgtaatggcgtcaatattaacaatttcgccagcaaaatagaggttttcatgtagcttgctttccatggttttgaagttgatttcttttaaatcgattccgcctgctgtaacaaattcttctttaaaagtactttttccgttgacctgaaatgttgctttcgtaagttgtgaagcgagctgttgcaattgatttttagacaaatcggcccatttggtttcggtgtcaatgcctgaagccagaactaaactttcccataaacgatttggaaaatcgaaaggagattttttcgagacggtttttttggcatgctcctgttttagatcttttagtattttttcagcatcttcggtgtcaacatcatttaaccaattaacgtaaatagtaaactgatagtttttgttgtgaagaattctggcgccccaggcagacagtttcagaaccgcgggaccgctcattccccaatgtgtgattaacaaaggtcccgtcgactcgagtttggtatcttttacggttacagtgacttgtgctgcaactccgggtaattctttgattctagggtctttgatgttgaaagtaaacaaggagggaaccggacttacaattgcatgtccttgtgtttgcagcatttcccagattttaggattgcttccggtagccattactaatttttcggcagcgaaattttcattttgggtatcaattttccaacaatcttcttttttaaaaatcgattgtacgctttgccccgtgagtacctttatgcctagtttttcggttgcttttaagaaacaatcgataatggtttgtgaggaattggaaacaggaaacattctgccatcttcttcgattttaagctcaacaccatgtttttcgaaccattcgatggtatctcccgaacaaaactgatgaaaaggaccgcgaagttctttttcgccacgtggataaaatttaaccaattcattgggttcaaagcaggcatgcgttacgttacatcttcccccacctgaaacacgaactttagaaagtacttcttttcctcgttctaaaatggcaatttttagtttaggatttttctctgcaatattaatcgctgtgaaaaaacctgcagcacctccgccaacgatgattatgtcgaaattttgagtcatatttttttatttgccacgaattcgcgaattatttttttaatctcaaagaataaaaattcgtgaatgcgtggctattttttaacttatattttatccggacaatcagagattattccatctactttataactttttactttttgaatgtcttcttccgtattaacggtccagggcagaacgagaaatcctttttgctgtattttgcttacattttccgaagtcaataaatgaaaatcaggatggatggcttttgcttttatggtttcggcgaaagccaaagcagtatcaggatcttcttctgttaaaacaccaatcggaattttttgatttaaattggatgtttcctgtagcatattccaatcgaaacttgaaacaataaaatgattgtagttccagtttttttctgagatataatgttcaattaatgtgacaacttttttgggagttcctaaaccttttaattcgatattgatcagacattttttgtcaaccaaatcaaaaacctcatttaaagtagggatttgatacttctcatcaatcagaaacgattttaaatcacctaaagaaaaagtattaacaaaaccttttccgttagttgttctgtctatcgtttcatcgtgcattacaattatctgatcgtcagcactaaggtgaacgtcaagttcaattccgtctgaatttaggtctaaggctttttgaaaagcttgtaaagtattttcaggttcgtatgcttttgcacccctatgagctatttttagcattttgttcatttcgtgaaggttcagaggtgcaaaggtacaaaggtgcaaaggaaaaataatagccacagattaaaggattagaatgattttaaaaaatctgtgataatcctttaatctgtggctaaaaaactttgtgaatctttgcggtaaatgcagtattttttctaaccgcaaagggcgcaaagttttgggcaaggtggacaaggaatttactaaaaattaaatagccacgaattcacgaatttttgttctcaaagattatcaaaaataattcgtgaattcgtggcagaaaaactttgttgcaataaaatatctattccaattctaaaaccaaagcggattttggttccaaagtaatttcagacgttaaattgaatgtttttcctgtaattacgtctttacctgttttaaaagttttgatgttttctttaaagcgattggtttttatagcttgctcttttgcattgttattgaaaacaaccattaccgttttagcatctgtatatctgaaatacacataggtattgttttccggaatgtaatgtgtcatctttccaaaatgaacggcttcgtttgattttctccagttgaataatttagaggtaaaatcaaagtaagcagcctgttcagctgttctgccttctttggtgaaagcattgtttttatcgccagcccatccacccgggaaatcctgacgaatatcggcgtcgcctttgcttttgtcaccgcccattccaatttcggaaccgtaatacacttgtggaattccacgtacggtagccaataaagtcattgttagtttgtattttgctaaatcatatttaaaattatgattgatacggtctgtgtcatgattttcggcaaaaactaaaatattattggtgtctgggtacaaataatccattgcaaaattgttgtagaatttaatcaatccattatccttgcttggttcattttcgttgaaagccaggctaatctggctttgaagcgtaaaatccatcacacttggtaaattggaattgtaattttcgatcgctccaattttactgtctttttgccaataagctaagttcgcctgattgtgcatccatatttctccaacgatattgaaattaggatattcgttcgtcactgcttttgcccaattggccattgcggtttgatcagagtaattgtaagtgtcaactcttaatccgtcaagattggcatattcaatccaccagatcgcattttgagtcaggtatttggcgacaagaggatttcttaagttcaggtcgggcattgaaggcacaaaccagccatcgatacatacttcctgatctatttttgaagcgtgaatatcggtaatcacttcacgtctgtggtgcgtttgtgtaaaagtttcgaattgattgaaccaggttttggttggaatatctttcatcatccaatgcgtaatcccccagtgattggtcacataatccattaccagtttcatgtttcttttgtgcatttctgcagataaacgggcgtaatcttcattagttccgtaacgcggatctattttgtaaacgtcagattgtgcataagtatggtacgagtgctgtttgtcgttgtcctcgcaaaggggtgtgctccagatagtagttgcaccaagagacgaaatataatccaggtttttaatgattccttcgatgtctccgccatgacggccacttggatcctgacggttccctttttcggttaaagcggcattgctgtcattttttgggtttccgttggcaaaacgatccggcatgataagatacattacatctgatgcatcgtagctttttcgatctgccgagttggttcgtctttctttaagggtgtatttttgcgtaaaagcgactttatttttggttttgaaggagaaaaccaattctgaagcttttaggttttgtgtatcgatggtcacaaaaagatagtttggattttctgttttttctacgcttttaatcacagcattgttggaaacagaagtttcgtattgtgaaatgtcttttccgtagaacataatctgcaattccggatttttcatgccggcataccaaaatggaggttctgttttttggatttgtgcttgcgcggaagcggaaaacaacaaaattattagaactaatttatagatgggtgatgtttttttgtttttcatagtaataggtagttattcttagtgtgagttcgagcgattttcagtgtccgctcgagcgattttcggtgtcagttcgagcggagtcgagaactttggccacatctcgactccgctcgatgtgacaattcgctcgaggagacagctatctcgatgtcacatcgagcggagtcgagatgagacaattcgctcgaggagacaactatctcgatgtcacatcgagcggagtcgagatgagacaattcgttcgaggagacaactatctcgatgtcacatcgagcggagtcgagatgagacaattcgttcgatgtaacaaaaagatgttgattaaaaaaaaagacaagtaattctgggggaaatcacttgtctttaaaaattacttcgtttcgataatgctgatcgcataaccgccgccaggagcagacaattgagataattttgatttattggtcaccgcaattttcttgatggtgtaagcttgtgggttggttttgtaatgcgcctcttttgcatcagcataaattgttgctgtgtatttttttcctttttcaagaaaactgaaatcaatgtttgaggtacgggcagtttctccgtttacgtttccaacgaaccagttattggttccttttgctttacgggcaaccgtgataaaatcacccggctcagcttcgatatatttactttcagaccagtctacggccacatctttaatgaattgaaaggcatccggaaaacggttgtagttttcaggagtatcagcagccatttgcaacgggctgtacatggtaacgtataatgccaattggtttgccagtgtactgtttacatgcgatttgttatccggattcattttactgatatccatttcgaagattcccggagtgtaatccattgggcctccaatcaaacgtgtaaatggtaaaacggttacgtggtttggtttagaacctccaaaagcctggtattctgttcctcttgccgcttcatttccaattaagttcgggtaggttctgcaaattccggttggacgaacggcttcgtgagcattcaccataattttataatcggctgctttttcaatggcatattggtagtggtttacaatccactggtcgtaatggttttcaccacgaggcaggatgtctccaacataaccgctttttacagcatcgtatccgttgtctttcatgaactggtaggccttgtccatatggcgctcgtaattacgaactgaacctgacgtttcatggtgcatgatgattttcactccttttgattttgcgtattgctgtaaaccttttacgtcaaaatcagggtaaggtgttacaaaatcaaaaacataatctttagagtgtccaaaccagtcttcccagccctcgttccatccttcaaccaaaacagcatcgaagccatttgcagcagcaaaatcaatgtatttttttacattagcattattcgctccgtgtgttccgtttggttttgcttttgagaaatcagaaacacccaattgtacggttggaaaatcattggtgtacgaccaagaacttttccctgtaatcatctcccaccaaaccccaatatattttacaggtttaatccaagatgtatcatcaatttttgacggatcgtttaagtttaaagtcatttttgaagccaagatttctctcgcgtcatcgcttaccataatcgttctccaaggtgaatgacttggtgcctgcatgtatcctttgtttccttttgcatccggtgttaaccacgattgaaaaatcatgtttttatcatctaaattcaggtgcatgcaagaatagttaatcaaagctgcttcatgtaagttaatgtaaataccatcagctgtttttagcatcaaagaagtctgcactcctgttggagaaaaagatttctgcgatacgttggcagtatatgctttttgagataaacctctgatttcagataatttcgatttggtgtaatcgtattcctgagtgtcataatctcccggaatccagaatgcagtatggtcgcccgccattgcaaattgggttctttcttccttaattacaaaataggtaaggtttttttgagtcgggaactcatatcgaaatcctaaaccgtcatcaaacaaacggaaacggattacgatttgtctttctgttcctttttgatttaaagttacagccagttcattgtaatggtttctgatctgatctacttctccccaaaccggtttccagttttcgtcaaaagtgcttgttttggtatcaacaactgtaaaatcattcagtaaagattttttatcatcttttagttcaagacctaatttactggtttttacaacctctttgtttttgtatttcagattgtaaactggagttccgtcgttttgaagcaaaaactccattacgaactttccttcgggtgattttaattgttgtgcttttgctattgagctgaaagcaaacaggattaaacttgcgaaaaataagtttttcatgttgttaagtttttaagtgtgttgtattaattggtttgaaacaatttttctgcggttaccggatctccattaactacaagggttaaatcctgatcaccgtctaccgtaaaagttgttccattatgatttacagctacttttaaaatttgatttctgaaattaattttaaaagaataaccgttccattcttttgggatttttggcgaaaaatgaagctgatcgtttttcacacgcattccgccaaaaccttccacgatactcatccatgttccggccattgaggtaatatgacagccttcttcaacttctttgttataatcatcgagatccaaacgggaggttcttaaatagaaggtataggccatgtccattttgtctaaaacagcagcctgaatagagtgaacacaaggcgacagcgagctttcatgaaccgtaaaggattcgtagaactcaaaattacgttttaattcttctttagaaaaatgatcttcgaagaaataaaaacactgtaaaacatcggcttgtttgatatatggcgagcgcaatacacgatcccaggaccacttttgattaataggacgctgagaacggtctaagtcttttaccggaattaattctttgtctaagaatccgtcttgttgcaagtagatgcctaattcttctgaagttgggaaatacatgttaccggcgacttttttccattccagaatttcagcagaagaaagagctactttttccataattctctgatgatctgcaggatattcggcagccactttgttaatttgttcttcggcataatcaatacaccattttgcaatataattggtgtagaaattattgttgatattgttttcgtattcgtttggacctgtaactcccagaatcacatattgatttttggctttagagaaagaagctctttggtgccaaaaacgcgcaattccaatgagtacttctaaacctttttcaggaatataagagtagtctccggtaaaacggtggtaattgtaaatcgcaaaagcaatagctccgtttctgtggatttcctcgtgtgtgatttcccattcgttgtggcattcttcgccattcatggttaccattggatacaaagcggcaccgtttttaaaacctaaattgtctttggcgttttcaattgctttgtccaattggttgaaacggtaggtcaacaaattgcgggcaacctgctgatctttagtggccatgtaaaacggaatgcaataagcctcagtatcccaataggtagatccgccatatttttctccggtgaaaccttttggcccgatattcaaacggctgtctttccctaagtaagtctgatttaactgaaaaatattaaaacggattccctgttgtgcttttacgtctccgtcaatggtaatgtctgacatttcccagattttactccaggcctcgatttgattctgaagtaaagtgtcataaccaagagcaacggcagttttaatgcatttttcggctgcagtcagtgtgttttcatggttcaaagaaacggtataaccaccaattttttggattgatgaggtttgtccttttgcgataatggtaccgtaagtaaactgaattttatcagcagttgaatcgattgttgacggcgaaatgtttacattttctccgttggcaaaaatcgtattgtgcataaaagtggttactttaaaatgcgttttaaaagtctgcgccgttacaaaagcttcatttgctccttttttaacttcaagaggttcccagaatttttcgtcccagttggcatcttcattggtaactcctgcatcgatataaggtttgtaaacaattttggcatctttgtttaaaggggtgatctcgtatttaatgattccggtttcatccagatctaaagaaagaaaacgacgaatgtttacggcaatttcggttccgttttttaaagtcgcttcaaaagaacgattgtaccagccctctttcatgttcaattctctgcgaaaatttttcacagcagtacaatggtgtaaatccagattttcttcgttgatctgaatgtcaattccaatccagtttggagcgtttaatactttggcgaagtatttagggtatccgtttttccaccagcctactttagttttgtccggataatagattccggcaatgtagcttccctgaaaagtctcccccgaataggtttcttcaaaattggcgcgttgtcccatagcaccgtttccgatgctaaaaagactttctgatgattttactctctcagcgtcaaagccttcttcgatgatggaccaattgtctggtttaatgtaatcttgattcatttttttcttaattagataattaggcaattagataattagaaaagatgtcaattagggaattagatctttttttgactgcaatatttaatttttatacgtctaatggccaattaattactgttttagtttttgattgatgattttcttaaatccgattgttggtcaattagataatgttgctactattatctaattgacgaattatcttatttccgaattaatgattcgataaaaggagtatccattgagttaaaatcctcaaagatatagtgtgcttcgtgcagaattgttttggaaccgattccgatactggtcatttttccaatattggcggcctgaactccggcaactgaatcttcaaaaacaaaggaattttcagggctaatctgtaacaattgagccgcttttaggaaaacttcagggtccggtttggcattggtaacatcgtttccgtctacaataacatcgaagtacgaaagtattccggttttctccagaatcgggcgtgcatttttactggcagaacccagggcaattccctgattttgttcttttaagaattgaagaatattaaaaactccgggaagaatttcgctctcgtccatgtcaaccagataagacaaatagtcttcgtttttctgaatgagccatttgtctttgtcttcctgagaagcgggaacgttccctaattcaagaattatgtctagcgaacgcacgcggcttactcctttaagtaattcgttgtgttcgtgtgtaaagtttatgtttaacgcctttgcaattttctgccaggctaaaaagtggtatttagcggtatcaacgatcactccatcaagatcgaagatgaatgcttttttattattcatgaatttcaattttagttctgctatttactctaagggtaagtaatccggcaaatatcatagatacacctccaataattaaggcgtagataggttcgttgtgaaagaattgtttgatgacaaatcctaagattgtggcagccacaatttgtggtattactacgaagaagttgaaaactcccatataataccccatttttgctgcgggtaaggctccggatagcatggcataaggcattgacagtatacttgcccacgcgatacccactcccaacattggaagaatgagcatttgtttgtcgccaataaaataaatcgagattaaaccaacacctccggcacataaggccagtaaatgtgttgctctaacgcctactttttttgcaataaccggcaataaaaaagcaactgctgccgctactccgttgtaaactgtgaacaaaactgaaacccagtcggcggcatcattgtaaattttagaagtagtgtctgtagtaccaaaaatatgttgtgtaacggcttgtgtcgtataaatccacatcgagaataaggcaaaccaggagaagaactgcacccaggccagttttttcatcgtgacaggcatgttcaaaagatcggtcatgatgatcgtaaaaccattgtgaacctttgaagttcttaattgtgaagcaatcatgaataaaatacccatgaaaaccaagccaacaaacagaatgtaaagttctttagccaaactgttctcgaaaattaaaaaggaaaccagagctccaactaccgccaatactaaccctaaaaagaattgtcttttgatgttactttcagattctgtttccggattgaggataagaccttctttgtcttttttgctttgaagttcaaaagcatgaagttcctcaggagtgtattcagttgttttaaaaacagtccataaaacagaaagcaggaaaacaattccgccaatataaaaggaccatttaacagaatccggtataattccttccggagccgtattgcttacgtcgaaaacattagtaaaaagatagggtaaaaccgaacctacaaccgcaccggttccgataaagaaactttgcatggcaaaacctagagtacgctgcttttcaggcaaattatctccaacaaaagcgcgaaaaggttccattgaaacatttatcgatgcgtccatgatccataaagtaccggcagctatccataaagttggagagttgggcatgatgaataaggcaacagaagacaagatggccccaattagaaaatagggacggcgtctgcctaaacgagtccaggttctatcgctaaaataaccaattacgggttggataattaatcctgaaaccggagccgcaatccataaaattggaatttcgtcaattttggcacccagagtttcaaaaattcttgaagtatttgcattttgcagtgcaaaaccaaactgtattcccaagaaaccgaaactcatgttccaaatttcccagaaacttaatttacgcttttccattatcgtaattaaagaattaattagacgataagcgctttgcttatcaaaacttacttattattttcgaagtaaaagtaaaagctttgagcaggcgtaaaagtattaattatttttttaaatacactaacaaaaaagtcataaatgttgtttgtgactttagaaaatattgatttttaggtttttagtcagtagattctctttttatcaaatgggtttcaataacttctgtggtgtaattttcgttttcttcttcatcgtcctcatgttccgcttcgagtctttcgatcagcattttagcggctttatttcccattttttcaccactctggcttacggttgtgatgcttggagtagagtatttagaaataatcccgtcagtaaaggcgattacagcgatatcttcgggaactttgaggcccattttgcttgcggttttgataatggttaccgcaaaaagctcatttacggcaaaaacagcatcaaacgcacggtcatgtaaaagctggctgatagtgatttcacaggtatcaacatcttcaattttgatgattaaatcttcattaaaaggcaatccattatcgagaagtgctttttcgtaaccgtcggttctgagtttacccacacttacgtaatcaacggtagtgaccagagcgatttttttgcggccgttgtcaatcagactctgaacggcttcataagcagctgctttgtcatcaataatgactttatcgcacaaaatgtcattggtgacacgatcgaacatgaccaccggcattccctgattgataacctcggtaatgtggtggaaatcacctttgtattgtgtttctttagagagcgacatgataaaaccatcgatacttccgttggctaacatttccatattcagcacttctttatcgaacgaatcgtcagacaaacagattacaacactgtagccattttcattggctacctgttcaattccgttgatcacggtagagaaaaaatgatgtacaatttccggaatgataataccaatacttttggtttttcgattttttaaactaagggcaatattgttgggcttgtagttgtaaaactttgcaaatgcctgcacttttgcgcgcgtttcttctcctatttcctgactgtctcttagtgattttgagaccgttgagatagagacgtcaagttcctttgcgatctgctttagggttattttacgtttcatagttgttatttgaaaaaaatctaattgttaataaaggtatcttatatttctataatcgacaatttttgacttaaaagattacaaaaaaaagaaagttttcaacactaccacgttttcgtaaaccaataaaaaaggcaagcggttggtcatgttaattaattcctaattttgaaattcgaagtaaaattaaaaacttaactaacaatcaaaaactcaaactaaatttaaacaaaaagtatgaaaacaatttacaaaaagttgttatttttattcctcttgttaccgtttactgtgttagctcaaagcactttaaccggatcagttgtcgattcggcaacgggacagccaatcccgggagtaaatgtaaatgtacagggtgctccaggtggagcatcaacagattttgacggtaaatttcagttatctaatgtaaaaaatggggacaaaattttggtttcatttatcggatacaaaacgtcaactgtaacttataatggtcaaaaaacactaaacgtttctttagaggaagataccaatcagcttaaagaagttgtggtacaagtaggttacggtaccgttaagaaaaaggatgccacaggttctgtatctcaaatctcggccaaagaatttaacaaaggaattaacgttactccggagagtttaatcggtgggcgtatcgcgggtgtgaatgttgttggaggtggtgctccgggagctaaagcggatatcagaatccgtggaggatcttctttaagtgcctctaatgatccgttaattatcttagacggacttcctttaagtaatgctgtaccaagcggtgcgacaagtattttgtctaccatagatcctaatgatattgagtcttttacggttcttaaagatgcgtcagcggccgctatctacggttcacgtgctgcaaatggtgtaattgttattactaccaaaaaaggaacaaaaggcggagtgaaggttaattttagctctcaggttggggttaatactgtcgcaaatacagtagatgttttgagtgcggatcaatttcgagctgtagtaaatgcaaagggaacaccacagcaaatagcgacattaggaaaagcaaatacaaactggcaggatgaaatctttcatacggctttaacgacgaataataatatctcggtaagcggcgctttgttcgataaattacctgtacgtttatctgttggaaatgtagataatccaggaatcttaagaaacacttcttttgaaagaactacgacatcgatatcgttaaatccggtattgtttgacaagcacttaaaaattgatattagcggtaatattgcattcgctaaaaatcattttcaggatgaaggtggagtaattggaagtgcattagcttttgatcctacacaatctgtgtatcaggaaggttctcgttatggaggttatttcgaatggttggaggcaaatggtaacgtgcctttattaccggccagaaatcctgtagccagattaaatcaggaggataaaagagctacttctaccagaaaatggggaaatattagtgtagattataagtttcatttctttgaagacttaagaattattgctgaagccggtattgataaatttagcagcaacgggtataatcaacaaagcacacaaagtattctgggatatcagccaaatgcttttagcagcgggaactggataaacttaggaaattacaactcctatacagatgatcttcaaaataaaaatttaaacacctatttaaactatactaaaactttagggaagtttaaaattgatgctactgcgggatataactaccagttattccaaaaagaaaaatatgagtcaggggaagttagacagccaacaccaagagaggatgttgctacagatccgaatgttaatctgcaatcctattttggacgtttgactttaaattatgacagccgttatttattgaccttaaattatagaagagacggaacttctcgtttctctaaagagaacagatggggtaattttggaggagcagcttttgcatggaatgttgcggaagaatcattcttaaagggaaatagtacactttcaagtctaaaattaagagttgggtatggtactaccgggcagcaagacattacatctgcttatgactttttaccaagagtaactttaggaacgattaattctcaatacattttcggaaatacggtttatccaacagcaagaccggaaggatataatacaggtatcaaatgggaagaattggccgaaacaaacattggtgttgattttggattccttaatgacagaattacaggttcggtaaactattttgataaaaaatcaagcgatttgttagcggatgttttagttcctgatggagcaaatttaagaaatcagggatttaataatattggaagttttgaaacaaaaggggttgagtttagtattcagtcggatgtcgtaaaaaatgataatttaacctggaatgttgcttttaatgctacttatcttcatcagaaaattacagatttaggaagtacagtgcctggtttcaccggatatattgtaggagataatatcgcaggaggttctggaaataaaattttgataaattcagtaggatatgctccaaattcattctttgtttatgagcaattgtatgatgctaacaaaagaccaattgaaggagcttatgcagatagaaacggagatggaaaaattgatgacggagaccgttacaaataccataaaccgtcagcagattacactttcggtcttttttcaactttaaattacaaaaagtttgattttgcaatgaactggagagccagtttaggaaattacatttatgacaacgtaagttcagataaaggatatttattagcaggattgagaagacagtctgatttgggtaatattagttctgattataataagaccggattcacaacaaataataattatttatcaaattattttgtaaaagatgcctcgtttataaaattagacaatgtaacgttagggtatactttggataaagccttgttgaaatctgtttctatgaggttttcagcaggagtacagaatgtttttgtacttacgaaatacgatggtttagatcctgagaaattcaacggaattgataacaatgtgtatccaagagcccgtacttttatatttggtgtaaatgctaatttttaaaagaaaacggataagtaaaatttaaaaaacaaacaaaatgaaaatatcatttaaatatatatcttattttttcctatttattttaggattaaatatgacgcttacttcgtgtacggacgatttaaacgtgacacccaaggatgatgatgaatttctttctgaagctttctacaaagatccggcttcatacaaacaggtattggcgaaattatatgccggattgtatgtaggaggaaatgatggtgatggtgatgcaaacataccgggaagaaatcctgatatagcaggacttggtggtgattttagcagttatttaaggctgctttttgtaacacaggaattccctactgatgaggcaattatcgcgtgggcagatggtaatttaccaagcttaaatggacagacctggtcggcagataatgagttcttgtacggaactttctccagagcattttatcacattagtgtggccaatgagtttttaagacaaactacagatgataaattgactgccagaggagttgatgctaatttaaaagctcaaatagctgcatttagagcagagactcgtttcttaagagctttttcatattacaatctaatggacttgttcggaaatgtgccaatcacgacagagaatgaccctgtaggattcttttatccggtacaaaaatcaagagctgaagtttttgcttttatcgaatcagagttaaaagatatcgatgccagtttggtagcttctaaacaaaacgaatatggaagagtagataaaacggcagctaagtttttattagcgcaaatttatctgaattcaaaagtttatactggaacagatagaaataatgaagcagcaactgtatgtaaagatattattgataactcacaatatacttttgctaacataccgtacaaaaatttatttgctgcagataacaatagaaacggagctcaaaacgaatttattttccctgttgtaagtgacgggaatgcgattagagctactggcggcggaatgagttttatacttcatgcttctataggtggtaatatggatgcggctgctcagggaatgaatggtggctgggcaggaattaggactcgtagagaatttgttggtctttttcctgatgcaactgcaacagctgataaaagagggactttttatactaaaggacaaaatttagatattgccagagttgacatttttaccgaaggatatgcggttactaaatatacaaacgtaaattctgatggaactgcagcacaaagaaatgatattccggatacggactttccaatgtatagattatcggacgtctatttaatgtatgccgaagctactgtaagaggagcaagtgcaggtaacatcggtacggctgtaggatatgtgaataaaattagaaccagagcaggtgccacaacaattacggctcctgatttgacactggattttatcttaaatgaaagaggaagagaattgttttgggaatgtcacaggagaaccgatttgattcgttttggaaaattcacaggaggatctaaaatttggcagtggaaaggcggagttatgaacggaagtgctacagatccttccagagatttaatgccaattcctttaaaaacgattcaggcaaatccaactttaaaacaaaacccaggatactaattaactatataaaattataatcaaatgaaaaatatatataaaattttaatcgcattcgttggtgtattagcggtatcgtgtaacgcagatgatgtacaggacagacctgtaattgaagcggcaactgcaccggttttattaactccaaaatcagattttagtattgtgcttcagaatacaaatgcagcaaatgcagcaacaacatttgtatgggacgatgctcagtataatggaactaagactgttgttacttatagtttggaaatggctgctgcaggaactaactttaaaacttctacagtagtggctactacaaccgataaatttaaaagttttacggttgcagaccttaatacagcttgtttaaatgctggttttgctccatttaaggcagctcagattgatgtacgagttaaatcttctgtaggaacaacaggttcagtaagtcaggtttcaaatttctatacaattacagcgactccttatccggcttggccaaattgggggattattggttctgcaactcctaacggatggagtgaccctgataccaatttagattatgatttaagtactaaaaaatattcctatgttggaccattaacagtaggtgaaatcaaatttagacttgatgattcatggggtactaattatggagatgatggtaatgatttgacattagatgccggaggtgctaatattccaattacagtagccggaaattatactattgttatcgattttactgcaaaaacttatactatcaaaaagaactaagtttttttatcataacggggctatctacaataagatagcccttttttagtcaagctagctaaccaatcaaccacattatgaaaaaaactttactatggatcacatttttgtggtctgtggctacttttgcccaaatgcaaacagtaagccactctgtaagtccatcaacttttgaagagactacacccattaccatcaccattaagggtacaagtgttgatgaaagtagctggggaattaccgaccattccttgtacatgtgggcatgggcttttgataccaacgatactgctcagaagggaagtccggataatggttcctgggatgcttcaagcgaggcgagcaggtttacctataatccgggtacagacacgtataccaaaaccattacaccaacagtttattataacaccacagggattggaagaattgggtttttaataaaagccaaaaatggaaatggcgataaaaaatcgcaggatattttagtagaagtaggcagctttcaggtcactttgacttcgcctatagaaaacagtgcatcaattataacagcgggagctaattttgatattgcagttaccaatacaaacggtgcagcaagttattccttaaaggcaaacggaacggtgattaataccaacccaagtaccgcaacttattcctattctcatattggggttaccaacaatcagagttacgaattgagtatcactcaggccggaaccacgatagtaaaaaagttttcggttgtggtaaatccgaatacggttttagaagcaatgccagcgggcttgacagacggaataaactacaatcagaccgatgccacaaaagcaactttggttttggatgcacccttaaaagactttgtttacgttgcaggaagcttcaataactggctgccaactttggcttatgctatgaaaaaagaccctgcttcgggcaaattttggctggaattaacgggtttggtttcaggtgccaataatacctatcaatattgggtggtagatactacgccactggcgaattctccatctttggtaaaaacggccgatccgtattccactttagtgttatcacctttcgatgattcttctattcctgcaacttcttatcccaacatgcctgtttatccggcaggacagaactttgaggttaccgttctaaaaaccggacaaacaccctacaattggcaggtatccaatttcgtaaaacccgaaaaagaaaagttagtagtttacgaagttttggttcgtgattttgatgcagccagaaactatcaaagtctgatagatcggatcgattatttcaaaaaccttaaaattaacgccatcgaattaatgccggtaatggagtttgaaggcaatgaaagctggggatataatacctcgtttcacatggctttggataaattttacgggacttcggataaattaaaagagtttattgatttatgtcatcaaaacggaattgcagtaattctggatgttgctctaaatcatgctttcggaagaaatcctatggtgagaatgtggatgaatgatccggatggtgacggttttggctcgccaactgccgagaatccctattttaatacagtggctaaacatgcgtacaatgtgggggaagattttaaccaccagttgccaaaaacgcagaactatgttgatcgtgttatcaaacaatggattgaagaatataaaattgacggtttccgttgggatttaaccaaaggttttacgcaaaattgtacggcttctgatggagcatgtacggatgcctatcaacaggacagagtagacgtattaaaaaagtatgctgattattcatggagtttggatcctacacattatacaattttcgaacacctgggctcagatactgaggaaaaagaatgggctaattacagaattgctgagacaccgtctaaaggagtaatgatgtgggggaaaatgacaggaccttacaaccaattgtcaatgggctacgcaagcgagagtaatatttcaaggatgtcaagcgggaatcatggttttaccgcaaaccgattaatgggatatgctgaaagtcacgatgaagaacgtttgatgtataaaaacatacaatatggaaattcaggagtagggtataatgtaaaaacgttaaacactgcattgtccagaatgtcggcaattggggccgtttcattattagttccgggaccaaaaatgatctggcattttggagaattaggatgggagaattctatttttacctgtaatgataattcagtcaatactgattttgatgccactggaggcgattgtaaactcgatacaaaaccacagcctcaatgggttagtaattggctgggtaattcggcacgcagtaaaatttacaacgactgggcaaagatgattaccttgaaaataaaagagcctgtgtttttgggaactcctgtaattgcaaatacaaattcattatcagtgaacattaaaatgaccaatccggccttgtcttcaacccagttaaaggatgttttgatagtggcaaattttgatgttacaacacaaaatgttccaacaggttttcaatatacgggtacctggtataatttgatggacaatactactattaatgttactgacgtaaatgctcccttaaatcttcctgccggagagtatagaatttatggtaacaaagtagcaaatttagccattacggattttgaaaaaggaagtgcagttcatctgtatccgaacccggttatagattattttactttaaatgtagcagtgtcaaaagttcaggtatatgcagtttccggtcaattagtgaaaagctttaatgcgaaaggaaatagggattctcagtatgctgtaaacgatttgaaaacaggtttatatcttgtgaaagcagttgatgagaatgggcatactcaggtaatgaagtttattaaaaaataatttatcgaaataaatagaaaaatagaactgacaggtaaaagatttttggttttgttagtggtgagaaaggactgtctgtttttagacagtcctttcgttttttatgatctttttattttagtattgtattctcctgctacagcaaaatagccaaaagtgcctaaccctaaaacaattaatggagtgagaatgaaaagaataatgattccgaatacaagatcgtcttgtttgtctgaaagcagtttaggtaagccaaattcgaaaatgcaaaaataagtcgatgcgattgccagtataatccacagtacacctaaagcttgtttgattgaattcataaatagtatattaaaggtgatttgtttgatttttattgtcgatgtaaaccattccaattacaaaacaaaccgaggctataataattgggtaccaaagcccgtcaagataaaaatcatcttttccggcagctttagcatgagttacaaaataagttgaaattgccgggagtagtccgccaaaaattccgttccctacatgataaggaagtgacatcgaagtatatctgattttagttggaaacagttccactaaaaacgctgcaattgggccataaaccatggtaacaaataaaacctgaatgaaaactaagaaaattaaagcccattcatcattagaattgatattgataacaacactgctttgagattctttttcatcagcaaagtttgttttcttttctgtatacgtagttccgtccgtataggtttttgaaatcgtggtaatggtttgattttctttaaaaacagctgtatttgtagttgttttctccgctatttctgtcttgtgctttaggtcggttgtgttgtacatctttttgtaaataggtctgtaaaacaaaatagcgagcagcattcctcccatcataatatgttttcgtcctattttatcactcagccatccgaaaaaaataaagaatggtgttccgaataacaatgcgattcccagtaattcatctacttgtgaggaattaatattcatcactgttttcataaaactcatggcataaaactgtccggtataccaaaccacaccttgccccatagtagctccgaataatgcgagtaaaacaaatttcaggttatatcgattcccgaaactttcttttaaaggattggtacttgttgttccttcttttttagctttggcaaatacaggagattcatccatgtttttacgaatcaaataggagattccgatcatcacaatagaaacccaaaacggaacacgccatccccaggaatcaaaatcttcgggcgaaagaatgttttttgtggctaatattaccattagtgaaataaacaagccaacggttgctgtcgtttgaatccacgaagtccaatatcccttttgccccgcaggagcgtgttctgccacataagtagctgctcctccatattcgcctccaagagcgagaccctgaagtaagcgaaggattaaaaccaataaaggagctaaaaaaccaattgtttcataactcggaatacagccaattaaaaaagtagagccccccattaataagagggtagccataaaagtgtatttgcggccaatgatatcaccaagtcttccgaaaaacaatgctccaaaaggccgtactacaaatccggcagcaaaagtggctaaagtcgataagaatgcggcagtaggattgtcactggggaagaatttggttgagatgaccaccgctaaactaccgaaaatataaaaatcataccattcaatcatggttcccattgacgatgccgaaattactttccagatgccctttgtagcggtattgctcataagctgactttgtgtacttgatggtgaataaaagtataaagtgttatttcgcgaatatataagatatttttttatttatttaatgattttttaacaaaaagataatatttgaaaattgtttgtttctaaggtaaaatagttatgaatcaagaacaaaatttgggaagaaaagggttgaatgtccgaaaaaagacagcatcgtacacagcactatgaactggattaaggcacagaattaccctgaaagggcaaaaatgaatcataagcgatagtattatcttttggtaaataacacctaaattccgtgtcatccgtgtgccgtttttaaccgtaatgtgcacgaaggattatgcaaggaacgaaaagtctaataggaacgaaaaaagtttgtgttagaatgtttaacggatcaggttcaaaagttggggattaagcaaaaagattagataatctgaacaagaaaaaatctatattgctcactccccatccgtacacaatgtcagactggtttcttacggacttaaactgagatttgctttacgttaattaacaaacaaaaatcttaaataactacttttctcgctcgggaaaaattaaaaaagtcggtttcttgggggaaatcggcttttttttttgaggaatctcagttcatccaaaaatatcaatccaatcattgccattatgaatattaagaatacaaattggattatttccagactgatttaagctttaaaattaagattagttcttaacccgaatgccatacctaaataaacacattcatttctctttgtttattttttaaaaaatataatgctttttcatatataatctgatcacattttataacaagtatttctttattatcataaactctaaaaataatcatctgattgtttgcatactttaaaaatacacttttgatatctgatgcgccttttccaattttactccatccacaagaaagatgaaaaacgacatgtttttgggatatgcaaatgaagccacatttacgagattttaaatagacatttaacatacatgaatcctgatcttcttcataagaaactatagttggtctggataatattgaaaacataaataataaattaaatgattgatatgcctattgcaattgctaaacacattttatatggtcccttttgtttaaatatatcattttatttgccaaagtttcaggtgtaacccacttataacaaggcaacctcatttcttctataccaactgcctgtgcagctccatacgcaaaagtggcgcattgtctgcgataatgataaccggaggtgtctgaattcccactattaaaatctcttatataatttgaaagacgggacatttgattaaaatcaagttgataagttcttgaaaccaaatcgggacttcttaaatgagatttatcatctacaactaacattcccggcattccgaaaaatataaaagggcatgcctccgatttttgaagaccacgtccttgtccgggccagtggcccagatatacttcagtatccccggttgtattcacgccaataaaagcatggccgacaaaggtattgtccggagcatctgcataaatagtcaattgtcccgcactcaacccaaacggatccacccatccattagagtcatgcacgtaagcatagaaattcgggttatttcccagcagtcctattctgtcctgactcagataagttcctgtgtccggcgagtaataacgatatcggttgtagtacaagcccgtctctacatcctcaaattgcccgagctgtctgaattggacgaagttcctatccccttttaaaccttttaaagcaccataaatgtcataatcagtctcccaaataagattaccagtatcattgtaaacctgcacaggacgaccgatataatcattaataatggagaatttttcttcccccattatttttgcactcggtgtaaaacttccttcctgatatacccaggttatcagattgcctgttggctcaggtttatcgtatatcagaaagtctccgtcttcatctatggcgattaaccggggtctttctttcagatcgtatttccactcatgaataagaacgttaccgtcccaaaaatagcgatttatttgttggtcggcaatttttgccgtacgtctccccagtgcatcatattcaaagcgtaccactttaccatcagggttttgtaaactctcgagcatgccattggccagccagcggtaaatggtatcgccttgttgccactgctcgtgttcttgttgtagctttttttcttcttttttgttgcctataagtttatcaaagagattggttggtttttcaaaaactaacggttttgtaatatcacgaggacttttgtgaatcagattccccagttcatcatacttgtaatggtaggtttcgtctttgagtagtttacctcctttaccgtatttacgatcgctgtgatccagggttttgtaaaggtttcctacgacatcaggtgttctatagagttcttcagtgccattataacttttagccaaattcccaaaatcatcataatcaaagtaggtcatgttttgggttagctgatttacagcactgcgaagctgtccgttggtatcccaattatagaaacgggaaccggtacgtttaccattgacaaaaacttcctgttctttttgcttcccactgctgttataactggttttgatgtgcaatcctcctgtagcaaaacgttctatctcgcgccctaaatcatctcttttcagagtagtttcccaagcctgatgtcgttccttgagttcgttgctttgagcttctatacgttcgagctgtccttttggggtgtagtgggtgttgatgttggcgccaagacttgtttcgatatgggtacgctgtcctaaggtgttataagttgaaatcagcgttatagcattttcgggactgtcaagttgttgtttttgggtttcttttacgatgcgtccaacagcatcgcgttccagacaaatgcttacgttttggttgttggcttctgtcagtaatccgtttttgttgtaggtataggtttcccaggtaccatcatggtaatcggctctgataattcgcccgagtgcatcccgttcatagtcggtaaattttccctctccttgatcgattcgggttacttcaccggccagattgcgatggtattttttaatgatcccgtcaaaagcggtttcacacatgatgtatccggctttgtctctcctaaaactataactttcgttgtcttcattttttatactggtcaactgctccatcttgtcgtagtcaaaacgtacttttaccccgttttgctctcttacggcaaggcttcccattggggtatagctgaattttatatgatttttattgtcttttaaagcgattacttcctcataattattatacgcaaactcaatgatgttactgtctttttctataatttgctgtactctgtccaatgcatcataggtaaagtaatcggccatttgcataggggtgtaaatggcttttacacgtccacgatggtcgtattcccaactctttagtttttggtcgttttcgcgccattcaataagattatactgctgatcataaaccaattcaagtgcgttattatttttagcaacgccggacaatagcccgttttcataatacgtaaaactggtataggttttatcgggtgcaataatggttttgagctgatgtgttttttgatcattatagagataaatggttttatgtccttccggatctatggctatggaaggacggttttcctcatcaaataacatcatttcctgagtgccgtcaggataagtggtactgattttattgcccatctcatcataagtgaatcctaagatacggtcttcctgatcgatctggcgatacaattccataaactcggtataagtgttatagatactattgcccaacgggtctttgatccgggtaatgagctgatcaggttcataataataagtagttaccgctccgttggcatcggttaccaggttatacccttcttcagtatgatattctatccggccttcctgccagcctccgtcaccccaggtgtgtacacaacggttctcagtatcgtattcccaataaaaggtttgtccgttacgatccgttttctccaccatcagatgatcctcgtacacgattcggctggctttgcctaagccatccacaatagcgattatgttatgtaactcatcatattcataggccactaaaagctcgtcctgctcaggcccttccagttcaagtttctgaatgaatccgtctttgttacttacttttatgattcggccacaggcatcgatgattttgtttaggatatatcccgaaaattcaaaaaagatagaaagtccatcgggattgcttatttgggtgagttggtattttttgccgtcaaaaagggcaaaatcataataccgtttaccgctatgatcataggcctgataaccgattggggttctttttaaagtggttttttcctggcgcaggtaaaattcttcaccgggtagtaaagcaggaaaagcgaccaggcgtccatcgtccatacgaagtcctaaagcatcatcttcaggatacaactctacggctctgtcataaacactgtgtacaccatgtccgagccagcctaaatagtctgaatcggaataccagttgcgctcccaattcagggttataggacttgcaatatcaaaatcactgccttcatatatcaccgctccgttgatcaggtttacaggctcaaaacctgccttacacaataatttactgagtttattaggcccaatagcaccttttagaaatttattgaatgctttcctcctctctttcatcagggtaccaaaacccatactggcaatcagtccggtaggcatacctcccaaatcgggaacataaggaccgcccagtatcacgggctttccggtaggaataggcaaagaaaatgatgttggggcaaataatgtcggggcaaagggaagctttttttgacctactttggttgtttttcccatcgagatcgggattccgatatcgttgcaggtcattagcatatggcctttggggctcattcgggtactgtctgaaaaaacggtttgtgaggcaaaaaagttcacactttcatgaccaataatgggagccataagccagggagggctaaaaagcggaatatgcaccaaaggaattataattccgctggtatctgagttacccctttttaaaccattaacatacacactggtacctaaaaacggagtataatctgcagggtcaattacaatacctatataaggatgaaaaggattaaatggcggtaaagtagtaaaatgaatatctatcccgaccacaatggtcaagtgattgttggctaataacataatttcaggcgttgtttaattgatattcttttcttatttatacatatacccttacaagtacattcgaaaactactacaaataagggtaaatgtactacaaaatattaatcgtaaatacatttttataagattaaactttcaatttataacaaaccaaaatttcaggagccagaaatactaatttttcagtgttttcaaattgatttctgaatgacaaagtctcaataaggacggaagagtaatctccagataaacaatcaaattagtaactgattcaaatttaaactgatttctcgatgagcaaacgcctgtataactaggcttgctttttccctttcagggtaattaatgttaatttactgcatagtgcattgcactatactgttgcttaagctctttcagagctggtttggaaaagtgatctcttttagatcagactgcattgtaaaaaatattgcagcttcgaataatattctcaatacttttatttaaatctcaaagatgggctgaaaatccaaaggcaaaagcatagtgtatcgtattatgaaataaataaaccatctatcaaagtcctgtaagggcgaaagagtaaactccaatctatacgcctgatctcgtttaatcctcatatatttctatcattttttgtttgaggccgcacttttaattacttttatggtattaaatctaatcagcatcaatgattataaagaaaaagaatacctggtttaaaatgctctttgaatggcgaggttccgttttgccacagctgcttccaaggcttttattattactgctgttttcctttgtcgtggtttattttaaaccctggctccttcaatataatctgcacatcaatcctgctatttttacattgtttggaattgcgctggccattttcctcggtttcagaaacagtgtgagttacgatcgtttttgggaagggcgaaaactttggggtgcattgctcaatgatacccgatctcttgcccgacaaagcatcactcttgttcctgatagagaatacgaagtccaacgcgaaaaattcactaatttgcttattgcatttgtatacagtctcaaacatcagcttcgggaaaccaattctgatgccgatatgagtcgattactacccaaagagtttgccgaccaattaaaagaaactcgctacaaacccatactccttttaagagaattaggtctttgggtaaaagacgctaaagctgaaaataaaatagacagtgttacacaactggcttttgaagaaaatttaaataaactgtccgatattgttggcggatgcgaacgaattgccagcacacctatcccctacacctacagtgtattattacacagaacggtttatatttattgctttttattgtcctttggttttgtcgaaactatgggctggattacaccgtttatcattgtttttattgcctatacttttgtggcgttggaagccattgcagacgaacttgaaaatccatttggcctgcagcctaacgatcttgctctggatgcaatgtctgaaatgatcgaaaacaccttattagaattaaacgataaaaaaataaatccggtaacgcatcttaaggattactttattacctaaaagaggagtcactcctccattatatttcgaatatgaacagagtgttattagttgaagatgatcccagagtggcatcatttatcacaagaggattagaagaacatttgtatgaagttaaaaccattaccaaaggttttgaagccatcaaagaggtcatgcaaaacgagtacaatatcattatccttgatatcatgcttccggacattaccggctttgaagtttgcgaagttttacgaagcagaaaaattattgtacccatacttattttaagtgcacttgatacaccacaggaaaaagtaaaaggtttacaatccggagccgacgattatctcgccaaaccctttttgtttgaagaacttttggcccgaattaatgcacagcttcgtcgtgccgaattcagtaccggaattctcgattttcagtcctatgccggaatcgaaatcaatatgaaagaacaaagtgccacaagagacggcaaagagctcaacctttcatcaagagaactcaaactcctgattttctttatgaaaaatcgcgaaactgccttgtcaagagtggccattgcacaagcggtctggaacattgattttgacagtacctccaatactgttgacgtgtacattaattatctgcgaaataaaatcgacaagaacttccccactccgctcattcataccataaaaggaacggggtatatgttgaagcagaagagctgaaagagtaaagagtgaagagtgaagagtaaagagtgaagagtaaagagtgaagagtaaagagcaaagagcaaagagtaaagagtaaagagtaaagagtaaagagtaaagagtaaagagtaaagagtaaagagtaaagagcaaagagtaaagagcaaagagtaaagagcaaagagcaaagagtaaagagcaaagagtaaagagcaaagagtaaagagcaaagagcaaagagcaaagagtaaagagtaaagagtaaaaatctgctgaatctgctaacccgagcgatagcgaacaggcgaagcaatctgcgagaggaaataaatacccacttattttgaattatgttcccatatattaaaaacagccctaaagcgttatgaatctaaaaaaaaaattagcagtaaattctacgttgctttttgcttttatcgtcggattactcatgaccggatcattcctgcttttcagaagtcatatgaaagacctttactatgacaatctcgaagatcatgccttgactgctgctttattttattttaagaaggatgaaataaaagaattcacaaacgaacgataccatcagattgaagttcagtaccaccgaatcaacaatgaatccattcgggtttacgatgctaaaaccaaaaaattatacttaaaagattcaattgatattgagcttagcgaccatgaactgaatagtattgtaaaaaataaaatagaatcgtttaccataaaaaacaggcagtttgtaggtttattttacaaagacaatcaaggggattttataattgtagtctccggtatcaatcacaccggtaaccgacagcttgagattttgggtctaatgtttatccttttttacctggcaggtattcctctaaactatcttttggggacatttttagccaaacaaaccttccgtccttttaaagaagtcattgcaaaagtaaataccatcaccaccgaaaatctgcattcgagattagaagtgcagcaagctcaggaaaaagatgaaattaaagaacttgtaaccactttcaattatctcttagaaagacttgaaaccggtgtgatgacgcagaaaaattttctaaaaaacgcctcacacgagctcaaaactcccttgaccatcatcattggtgatattgacgtatccctgcaacaacccagaaccaacgagcaatatgaagaaattttaaaatctcttaaaaaagacacactgcatttaaaatcaaccttagatggtcttctggtactatcgggacttcagctgtctgaacctcaacaaatggaaaccataagaattgatgaaatactatggaatgtactggagaaaaaagcaattgaataccccgaatctaaagtatcagtagatctaagtgctttggccgatcgtgaaaatttactttcggttcatgccaataaacatatgctttttatagccctttacaatattttagacaatgcaattaagttttcatctcctaagccggtaaatgttttaactttctctgagcaccataaacttttaatacaaattacagatcagggctccggaatttcagaacaggacaaagaatctatttttgatctttttttcagaagcgatcatacccgccacatacaaggacaaggcttaggtctcttcattaccatgcagatactcaaactgcatcatattcatgttagagtagattctgaagttggaaaaggtacctctgttaccttagtatttccataatctgattcgtttctctgctgttttacaaaccttaatccaatctgtttttgcagttggtaacctttacttaacactctaatctttctttaatctactttaaatacaactctaatccgtttatttttaactatttacacaaatcattgattttaaagacctaaaagattctacaaacctaacagcttgatcattttaagttaacactaactatttttatcattttaagttaacaaaagcgttaaatccgatcggagcaaactgagtttctttgtcaaataaaaactcaaaaatcaatgacaaaactaaaactcattttttcggctgtaatgctccttgttatgggaaacatttttggtcagattactacctcttcattatctgcaaaagttaatgatggtacaagcccgcttacgggtgcagaagttactttaactcatttgcctactaatgcagtgtacaaagctgtaacagacaaacaaggtagatttagtttcgaaaatttaaatgccggcggaccttacgaattagaaattaaaagttctgctactaaagactactccaacgcacaaatacacttagcacttggcgataatgacctgccggtgatagtggttggcaaagcagacaacaatgtactggaagaagttgtgattacaagttctaaaccctcttctaaaaataacggaacgaatattaatgaaaaacaggtcaatggtcttccgttaatcaatcgcgggattcaggatgtgacaaaattagttccgcaaagttccaacaactcttttgccggtaccaatttcagatacaacaacgtcacgatcgacggttcgatcaacaatgatgcaatcggttttagtccgtctttaggaggacaatcaggaacttcaggaatgccgggaagcagtacacgttccaactctataagtcttgatgctatacaggacattcaggtgtatattgctccttacgatattaaattagggaactttttaggaggaagcgttaatgctgttaccagaagcggcagcaacaatgttacgggatcgatttacagttacggaagaaacgcagctattacaggccgtaacaatgccggtgacggttctaaaatgccaaattcttttggtgattatcaaattggattccgattgggtttaccgatcgtaaaagataagttgttcttctttacgaatatggaatatgccgaaagaactgatcctatattttacaatgcaggacaaaccgattctaacggaaaactgacttcattggtagacaacactaccgcgcagcaaatctcagacttcgtaaaaacaaactacggatttgatactggaactttcggtgggtacaacaactttgcaaaaagtcaaaaattcttcaacaaattagactggaaaattaacgaaaaacattcgttatcgttgcgaaacaacaccgtgatctcacaagcttccaacttagagcgtgatgcggcaaatttcagattctccagcatggatttcacgcaaaaaaaccaatctatcagtaccgttttagaacttaaaagtcattttaacagccagtggtctaactcgttcatcgccagttactcggctatcaaagattatcgcgatccaaaatcaggtaatatcatgtttccacaaaccgaaattggatataacggcggaaccatctttttagggaatgatcgtgaggcaaccgtatttaacatgaaacaaaatactgccgaaatcacagataaccttacctacaaaaccggaaatcataccttgttgttcggtacgcacaatgagttctacgacatcaattacggattcgtaaatgcccttaacggaagagtatcctacaaatctctggcagatttctacaacaaacttcctacccgtgttcgcggaacctatccttttgatggttcttcaagagaccaaatcttcaacaatccttatgcacagttcaaagtaaatctttacagtgtttatgtacaggatgaaattagaattggcaacaaacttaaagttactcccggtgtgagaatagactacacagacctgcctaataaaccaaaattaagtccgcaggtacaaaactctcctgctgatccaaattacggtaacacttactcctacactcccttaagtcagattaaaaacaactttttcagtacagcattagtttctccaagaattggatttacgtacaatgttgacgaagacaaaacacttgttattcgtggcggatcaggagtatttacaggaagaattccatttgcatggctgggatatgcttattacaatgatggtgtaggttacggaagttatgacaaaaataaccttagcccggcacaagttgctacagcgggagatcctttggcagcaaacggattaaacggttatcatgatgcaacgccaaaagtacaggccgatttagtggataacaaatttaaaatgccggcagtgttgagaaactcacttgccatcgataaaatcatcaacggttataaatttaccaccgaaggtatttataccaaagtaattcgtgatcttgaattccaacaagtgaataagactgataacccaacttatttttcttatgataccaatcatcaaatgcccatttatgcagccaatataaatcctgcattctcaaatgcttatttattatcaaacaccaacaaaggataccgatacagtattacggagatgatctcaaaaacgtatgattttggtcttaattttatggtcgcttatacctacggaaattctaaagatattactaacggaatccgtaactcgatggaaagtaatttccagatgaatcagtcgttaacaccaaataatcctcagttagcaacatccaacttcgacatcaagcacagaattgtttctaatgttggatatgccgtaaaagtggccgataacaatacgttctcagcaaatgtatatttcaatgctcaatccggaaatccgttttcatggggatttgtaaactccactattgcaggaacgggtcaggcagcaggattggcttatatcttcaaggatgccgcagaagcagcgaaatacattggtgtgaatgcagcaggagttccatcggctacagcagcacaacaggtagcagattacgaagcttttattaatggaaatgattatttgaaaagcagaagaggaaacttcacggaaagaaacggtgccactacaccatggaacatacaagctgacctgaaactaatggatgaaatcaaaattgctaaagcaggtactttacagctttcattcagcatcgcaaatgtcggaaacctgattaataaagattggggaagaagttactttgttccgaacacctacaattcaacagcaaatcttgggttaacaaaatcaggaaacttaggcggagttgctactggcgatccaacttatacgttccagaaaccttcgacatcaccttatactgtagatcagttagcctcaagattccaaggacaatttggagtgaggtatacgttctaaagattgtgttttatttttttattatcccccagtttcagtcccttttgaaactgggggatttttcttaactacaacctagtgctctcctccatttctaaaagccatcagcagcgtataagcgtttttgattacaacagccgaagaggtattgatagtcgaagatttaatctgacggtatccctgactggcagtacccaattcaacgggaaccattttaaaaccgtacgtaccagccttcaaaaaaacaaaaaacttaccctgccatcttaccacagcatcttccggaactgtaagcgcttttgcattgtcaaactctgcctcggcattaataaaaagtcccggtattaacgaactttcgtattgattcactttacaaatcacctctgccgcacgatcatcatttagactttgattgatataagcaatttttgcctgatactttttagacggattcgcattagtgaaagccgtaacaacctgcccgactgaaagcagctgtatgtctttttcaaaaacattcattgtcaggacaatgtcactcatttcaattaactcaaaaagcatgtcggtcgctgaaatgtattttcccacattcacattaatcttagcaaccaacccattgattggtgaatgaatcacaactgttttgcttattgttgaagcggttagttttttgacattaatccctaacaaccctagtttttgggctaatgatgacatataaatgtgttgtgtctgcatctcagttgcagtctgttccaatagtttatcactacttgctttcttaacattaagttccttttgtcggttaaactcactttgggccaattgaaatttttctttcgcggtaagataatcctgttgcaattgtatgtattgcatgtcctcgactaccgccaatacttgcccctttctaacatgcatgcctgccattaaatccgtttttttgatgtaacctcctaaaggaatactcactgttaccacactcttcggaggtaccgtcactgttccctgaagctgtaatattccttttactgttctttcttcaggacgaccaacaaccaattttgcatttttgatctgtgcatcgcttaattgaatactgttttcgggtgttagtacttttttactttgtggttcttttttgtcgctctggcaggaaaccagacatagaaaaacaaaaatgatactgctatatattttcattattttataaattattaagggtttgccaatcaattacggctttgttgtaatcgttaattcggtctaaatattcattttttatggtgatcgcctgattgaccactaaaacccattgcaggtaatcgatatctccattttccaattgactattggccgtatcgataatgattgtcgcattttttaatccttcattttcataataggaaagactctctttgtatttttcgatttcatttactgcattgacaatctctgttctcaattcaatctttgtagtttctgcctgtattttgtatgcttcataatctactttagcagctttattacgcgcggactgactgccgaaaaaaagaggaactgacaaaccgaaattaacataattaaatctctgactaccactataataaacatccttacctacagtgtttgtttgtgttccaatgatacttaaattattatagccaacggtaatatcaggtagtattttggactgttccgttctccatttccattttgccgcttctgcttcgtacattgaaagttgtacctggggaagctctgcagtatctttattttgatgtaatgaaaccataaaatcattttttacagtctctgaagcgggcacatgaaccatactatcctgaaggaccgtattaaacgttttaagcgtgatagcgatatctttattcaccattgcaagctggttcatataaaactgccgtgccgattgagaagcggttttttccaaaacagtagtttctcctgttttatagcgcagctctgatttctgttccattaatctgtaaatcgaatcggcataagtcagcaattcctttttactgttgagccagatgtaatcataaaataagttcctcacattcgacttaacctgctgtactgttagctgcgattctgcttttgcggcattgagatgttctctcagtacttttttctgatttgcatatactgttggaaaagcaaaagtctgactaatcccaaaacgggtgtcgtttacagcgctattaaactgaccataatcggcagtaaaagctgttttaggaatatcaaaagcagctttttctaattgttcttttgatctctcattcaattgagaagatttaatccttctgttgtgctgcatcgctattgataaagattcttcaagcgaaataggtgcatcttgtgcctgaaccgaagccgtaagaaacaaagccagcaccagtaaagtcagtttatccatcttatgttttttattttttttcgaaaaaactttagtatgatacgtcattaaataaatagccggaagtacaaaaagtgtaagcaaagtagccgtaatcagtccgccaatcaccaccgtggccaacggacgctgtacctctgctcctgcgccattgctcaaagccataggtaaaaatcctaaagaagcaacagcagctgtcatcaatacaggacgcaacctgtttttggttccggtaatgataatttgaagcggatcgataatttcaccttgtttttgtatgcggttgaactcggagattaaaacaattccattcaaaacggctacgccaaacaaggcaataaaaccaacaccggccgaaatactaaacggcatatcccgcaacgctagtccaaaaacaccgccaattgcggacaaaggaatggcagtaaaaatgataatgccttctttaaaagatcggaaagcaaaatacaacaaggctaaaatcataaacaaagctgccgggactgcaattccaaggcgcgattttgcctgttgcaggttttcaaaagtaccaccataggtaatataataacccggatcaaatttgatctgactgtttactttcttttgtaattcttctacaatagattctacatcccttcctcttacgttaaaaccaacaataattctccttttggcatcttcccgctgaatttggttcggaccttccacttcttttaccgaagctacctgatacaacggaatctgcattccggagcgggttgcaatcagtaaattacgaacatcctcaatatctttccgtccattagcttctacacgtaccaccatatcgaactttttttctccttcataaatactgcctgctacagctcctgcaaacgcggcatttacggtttgattgatatctgaaacataaatgccgtatttcgccatttctgcccagtcgtagtcgataacaatttgtggcattccggtaactttctccacataaagatccgtagctccttctacagtagtgctaatcgcgcctaactgctcggcatattttgccagtttatcgagatcttcgccataaattttgcaaaccaaatcctgctttgctcctgtcattaattcgttaaaacgcatctgaaccggaaactgaaaaccagtcgtaactcccggagcaacctctttaacggtttgggtcattttatcggccagttcaggaaacgaagaagcgctggtccactctgatttatcttttaagacaataatcatatcacctccttctataggcataggatctgttggaatctcggcactcccaattctggaaactactttttccacttccggataagtattttttaatgccgtcgaaattttctcaatggttgctgtggtcgttgacaaatttgttcccagtagtaaacgggtttctacagcaaaatcaccttcttccagttgtggtataaactcaccgcccattcggttaaaaagcaacaaggccatgccaaacaaaacgaaagctgaaatcacaatcccttttctaacttgcaatgctcgcgacaaaactctttcataataagactcaagttttatcattattcgatccgataaattgggcttatggcttatttttttgctaatgaacaaagaacttaccattggaacataagtaagggataatataaaagcacccaaaatagcaaaggctaccgtttgtgccattggcttgaacatctttccttcaatgccttctaaagacaatatcggaaggtatacgatgagaataataatttgtccaaatactgcagcgttcatcatccgccctgccgaacctgtcacttccttatccatctcttcttgcgaaatagaatcgatttctttgtactttttggcggaatgaatatgatgcaaaatggcttccacaataatcaccgcaccatcgacgattaatccaaaatcaagcgcacccaagctcattaaattcccgcttacaccaaacgtattcatcatgataattgcaaacagcatggccaaaggaattaccgaagccacaataaaacctgctcgcaaattgcctaaaaaaagtaccagtaccaatactacaatcaaagctccttcaataagattcttctctaccgttccaatggcattatctaccattttagtccgatctaaaaaaggttctatttttaaacctttgggtaagatcttctcaatttcggcaacccgttttttaacctttacgatcacattattcgcattctctcctttaagcatcattacaattccaccaaccgactcaccaatatcgtctgtcgttaaggctccgtagcgtatagcagaagacatttttacttctgcaatatctttaatcagaatcggagttccggcctgtgtatttttgacaataatattctgaatgtcttttatatttcgggtcagtccaacgcttcgaatgtaaagtaccgttggccctttttcaatataagctccacccgtgttttcgttattactgctcagtgctgtaaaaacttctttaatagtcaggttctgcgctttaagccgcgacggattaacggcaacctcatattgttttagtttccctccaaaagtagcgacatcagcaattccgggagttcccagaagctgtcttcttatcgtccagtcctgaatggtacgcaggtcttccagagaatacttcgtttcatatccgggttgcggtttcaaaacatactgataaatttcgcccagacctgtagtggcaggtgccatttcaggaatattggcgttctctgcaatttctactttttgcaatcgttcggccacctgctgacgcgcccaatacacatcggtatcgtctgcaaaaacaatcgtaaccaacgaaagtccaaaacgcgaaatactgcggctttctttcagctgtggtatattactaatcgcctgttcaattggaaatgtaattaagcgctctacatcttctgcccccaaagacggagcagttgtaataatttgtacctgattgttggtgatgtcaggaaccgcatcaatgggtaaacgggttacttcaaacacgccatagataatccatagcaacgtgaagatcccaattaccagtttatttttaacggagaactgtatgatcttattaagcataatttaatttatttgaatatagtaatgccagggctaaaacatcaaaaatgtcttaaccacaataaaaattctataatatgaaattaggctataggaggacgaaataccgaaaacaaggaaggatttgaatacaaatctgaggtataaggaattgtatccgattgtgaaaatccaacggtaaaaggaatgtaaaatacgggcttgtcctgcggaacaaacaccagctgtacgtaaggtccggatatgttcttaaacggaagctgcatatcacgatcagaatcattgtcttttaaatcttctccccagtaatgcatttccaaaaaatcaaaaaaactgatatcatgtctttgctgatgttccttaaaatgctccagcaatatcggcaatttataaaactgctgaaagaacccaatattggatacaattaaaaagatgaagagagatataatgatttttcgcacctcacaaatttaaacgatgtcacaaaataattttacacttacaacaagaagctactaacttttatggttttacttgtttatggcaataaaaattgtaattatcacattcaaaactaaaaattaaaactttttatctaatctaaaagttaatttagaacaactattctcaattcaaaattaaattgatccatcctaaggcatttttactcaaaaaagagcttcaaaattctaaaattccgaccccttttctatttcaaaatggacgagaatacttccattaaaattttgctaaaaacttcctaaaagcaggctaaatgctccttccctgctgacctcctttcattgttcaacttcttgtaagaatacaaaataaaaccagtattcttatctctctttttatctgtaaaaattacacgtaacttcttttttacaatttaataatagctgtaaaaagactttaaacaccaaaacacaaaaaactaataatcagttgattaaataataaaaactaaagaaattcaaaaccaagtgtacgttcattcgtataaattttaaaaaaaacatttttttctaccagattaatttatacttttgctactcactattcttattcattctaaataagaattacttacaaatttatttttatttggccaaaataaaaaagaattttcttagaaaaatttccaaaataaatgaaaattaagaacaaccccagtaaaatcaagctatcagactcttcttataaattaaacaaaatttcgaagaacatccgtaacaggagaagcgtctacgccaatcagtttatcaagggagaattaccggatcaattgcttgaagaaattttgacgaatgccacctgggctcctacccacaaaatgacagagccttggaggtttatcgtttttaggggtaaatatttgaagaagtacggcgaatatatggctaactattacagagatttctatactgaattatctcccgaagatcaaaaagacaaactttcttatctcgaaaattatccgctcaatgcagcctgcatgattggagtagtcatggtgaaaaacaccaaaattgacctgcctgaatgggaagaaattgctgcagtctcttctgctgtgcaaaatattgcgcttacctgtcatgctcataaaatgggcagttactggagtaccaaaggagtagctatcgattatgtggcaaaatttggcctctcagaaaatgaaaaatcgctagggcttctttatctggggtattatcccgaagccttaaaaccctccaaaaaaaagagaaccccattatctaaaaaagtcgtttacctcgactgaaaaataactttaaccccttaaaacaactattttatgaataccacattgattcgtacagaagtcactgaaaaaggagtccagccggaccaggatttttacaaagacattttccatcaaaactccggaacagaatacgctcaagccatgaaattagcacaggaacgcgtttcgaatttcctaaaaaataataaaaaacctttcagtggaatcaaacctgaagaaatccgagcaaaagttgaagagatagattttgacactccactacccgattacgaaagtctgctgaacgaagtagacgagctttatgtgaaccacgctactgcctttcaccttccggaatatattgcccacttaaactgtccggttgttattccggcactagcggcagaaattctgatcagcgctatcaactcctcacaagatacttacgaccaaagcgccggtggaacgtttatcgaaagaaaactaattgactggacaagcgagcagattggctatactcagggtgatggtgtttttacagccggaggctctcaaagtaatttgatgggcttgcttttggcgagagattattatgctttgcagtatcaaaaatggaatatcaaattggaaggtcttcctccggatgcacacaaatacagaatttttgtttcagacaaggcgcacttcagcaatcataaaaccacctggattttaggtcttggagaacaggcaatcgtaaatgttggagtggatcaaagataccgcatggatcctgaaaaactggaaaaagcaatcgccgacgaaattaggagaggaaatattccaattgccattaccgcaaccgcaggtaccaccgatttcggtaacgtagatcccttgaagagcatcgctgatatcgccaaccgctataatttatggcttcacgtagatgctgcttatggatgtggattattactgacagagaaacaaaggtatttattaaacggtatcgaattggccgattctgtaaccatcgattaccacaaatcgttcttccaaccggtgagcagcagtgcttttattgtaaaagacaaacttcagctcgacattatcaagcatcacgctgattatttgaatccaaaagaacaaaattacgatgtgcttccggctcaggttaataaatcgattgttcagactacacgccgttttgatgctttgaaactttggtttactcttcgttatatgggcaagaaaaagcttggacaatttactgaagccctaatcgaaatcactcaacaaaccgccgcctacattgaaaccgatccgaattttgaactgttatgccactctgatattggtattttattgttccgctatctggacggacccgttgaatcaaactcttgtgacgtcaacaaatacattaaagagaaacttttctatggcggcgaagtactggtagccagcaccaaagtaaatggagaattctacctgaaattcaccattttaaatcctcttaccaccctaaatgatattaaaaacattcttaacctcataaaacaaaacggagatgaataccacagactcaactaatttttaccaactggcagaacaagtaaactacaaatccctgctcaactgctattgcagagaatttagcaattggatccaatacgaaggtgttccaaaatacgaccctgctttggccgaatttatgaaaacgatcgatcatagttcttttcttaaatttgatttcactgctattggccaggaagtttttgctcctttggtttatttttctcaaagtggcgtacatgccttcggatttcccgtagtgtcacgcactattgcaacagatacattccgagaaataaatccaatcgaatttacggaacttgttgcagcttattctaaaacagaaaaccctgatattgatcctgttcctacgcaaaaacgtatgcaaaacagcatcgaaaatctggcactatatctggaacattacaaaaacagtgaccgtacagccaacaatccggaacagtcttttatagcttctgaacaatctttgatcctggggcataccgttcatccgttgccaaaaagcagagaaggatttacaaaggacgaattggttcaatattctcctgaaacccaaggacaattcccgcttcactatttcctgattcacccggaaaatgtagccgaaaaaagtgccgaagactatctgatcaccgattatctgagaaatgaaatttcaaagtatgccaataaaaatgccaaagaattactggatttttattcgcaatacaaagtagtacctgcacacccttgggaagccaactatctattagagcaaaaagaagtaaaagaaatgcaatccagacaactgcttttcagtctggggcaatttggtccttcctatgcggcaacctcatcggttcgtaccgtctacaatgacgaaagcgaatggatgtataaattctcactgcatgtgaaaatcaccaactctttccgcgtcaattacctacacgaacttaatcgtggttatgatgccgcgcagttgatgaaaacagattggggaaaaggcattcagaaagactatccacaaattcagctgattaccgatcctgcattcatcacggtggtttttgaagataaaattatcgatggtttcagtactagtatccgtcaaaatccttttcatggagccaacgccaataaaaatgtgacgctggtagcttctttgacacaggataacattttgactgagctgccaagaatcgtaactctgattgaagaatcggcaaaaagacaagacttaacagtagcagacactgctattgcctggttcaaacaatacctgaatattagccttacgcctttaattggtattttcaacaaatacggatttggatcagaatttcaccaacagaatgtaatggttgaattcgatgaaaatcttttcccttcaaaattctatttcagagacaatcagggatactttttccgtcagggacaagtagaagaactggaacgtttgattccggaatttggaaaagacagccgttcttttattgctgaaaaaagaattattgatttctgggggtactatttcttaatcaatcacttgcttggaattgtgagtgctttgggtaaaaacaaacttgctgacgaagatacactgcttaacctgatttacgaagctatcagaaaagagggagaatcagatgtaaccggtttagtttcacatttcaccgaaagtgtcaaattaatcgtaaaaggaaatttactaaccagtttaaacaatatggatgaggccagtgcaccaagaaccaatccggcggtgtacaaaactttcccaaatcctttaaacagacactatttctctaaaaaattaattcagccacaagcaaacaccactgtttttagccgttattttgagaaagaaaatgtaaccatcaccttgcgtccggtagatgtagacaaagatttggagatgcttcacgagtggtttcaccgcgaacatgctttgaaaatctggcagatgaactggccaatccgcgatttggaggtgttttaccgcacgttgcttccgggtggtcactcgcacagttacattggagaagctaatggtgttcctacttttaatatcgaagtatattgggcgagccgtgacattgtgggagaatactatgacgtacttccgtctgattatggaacgcaccagtttatcgcgccaaccgatccgaaactgaaatacggctctccggcaactcagtctatgatggattttgtattgagcgaatcaaaagtaggcaaaatggtaggtgaaggttctgtagattctatcgcttcgatgatgaacaaagctcacgttggatttaaaattcagaaagtaatcgaaatgcctcataaaaaagccaatctgaacttttgttaccgagaatggtactgggctaaattcccggctgccgaagagtttcaaaaaaatatcgtttcagccccacaagtttaattcataaaataaccacaatgaatacagaaaaaatatattcggtaatcggaattggaattggtcctttcaaccttggacttgccgcacttatcgaacccattgaagatttatcagcactgttttttgatcagtcggaaggctttgactggcacccgggtttaatgttaaacaatgccactttacaggttccatttctagccgatttggttaccatggccgatccaacgaataaatacagcttcttaaattacatcaaacaaagcggacgtgcttataaattttacattcgtgaaaatttctttatctacagaagagagtacaatgaatattgcaaatgggcggcagctcagttaagcaaccttaaattttcgcacaaggtaatttcaattgaccctgttgatgatgtgtacaaagttacggtgatccatactcagacgtgtgttacgactgtttattatacgcataaaatagttttgggtacgggaacttcaccacatgtacctgattttattgacacagaagctcttccaaatgtgattcatgcctctcaatatttgtatttcaaacctcagattcagaaaaatgcgtcggtaacaatcattggttcaggacaaagtgctgccgaggtattccgtgatcttttaccggatacggaagacggattgcaattgaaatggttcacccgttcgtcacacttcttcccgcttgacaataaatccaaactgactttggagttgacttctccggaatatgtagatcattttcacagtctttcggcacaaaaaagaaaacagcttttagacagtcagcatgggctatacaaagggattgatcacgaattgattaacgagattttcgacagcttgtacgagatgagcttagaagacactccactaaatgtagaattgcgttcgaatatgcgcctgacttcggtaaaagaagatacggatggttcgcatttacttgattttgtacaaacagaactggagcagcctttcgaggatcaaaccgattatgtgattctggcaacgggttacaaatataaagaacccacaattctttcaggaattcaggacaaaattggccgactggaaaatggcttattcaaagtacatcgcaattatactattgacaaaaacggtacggatatttttgttcagaatgctgaattgcatacgcatggactttcgactccggacttgggaatgggtgcttaccgaaattcgtacatcattaaccaaatcgctaatcgtgaagtgtataaggttgaaaaacgtattgcttttcaacaattcggagtacaaagagcaactcctgaactttcatcggcgaatgttttggaattagtaaacgagcaagtaaaccattagatcatactaaaaatcaactcagatgataaccccagaaaatacctttaaagacgctcagcacctcaacgctgatatttggaatcaggtcaatcgaaacttacttgccaaaagtatttcggaattgatgcgtgaagacgtcgcgaaccctcaaataaccgctaaagatgaggatggacttacccatttcagattagaaaccgacaccgcgagtatttactatactttttcggcttatccgagatttcttaactattggcatattgttaaagacagcctttgtaaagtggagcatgaagtaaaattagaacatatcgacgtaccgaatttctttatcgaacttcaggaaacttttggtatcaactcttttaccctggcccattatatcgaggagttactgcacaccttatacgctgatgcttacattcagtcaaaccgtcgtgtgcctgctgcggaactagccgatgctgattttcaaacgatcgaacacagtctggatggccacccgtgggtaatagtcaacaaggggcgtattggttttgactcggaagattatacaaaatacaatccggagtctgatcaaagaacacgtttaatttggattgctgctcataaaaacagagctaatctgcgtttacagaccgatgtgaacgatcaggatttttatgaaaatgaaattggcaaagaaaaactagatgcctttagaaacaagttagcggcattaaatgtagatccgtatgattatgtttttattccggtgcatgtatggcaatggcaaaataaactcgtgatgcaattctctaatgatattgcttccaaacatcttatcccattagagctaaccgaagacatttacagccctcaacaaagcatccgtacttttttcaacgaaagtgcacctcataaacattatgtaaaaacatcaatgtctattttaaacaccagccatgttagaggtttgtcgcctaaacaattattgatagcgccacgtttgacagagtatctgaaaaatgttcttaaaaaagacgagcacttgcaaaaaatgggagttgtacttttaggtgaagtcgtttcggttacctatgcccacccgagttatagtaaaattgacaatcctccttaccagtacaatgaatatttgggcgctatgtggcgcgaaagccctataaattcccttagagaaggagagaatttaatgacgatggcggcattattatatgtagacaacaccggaaaaagtcttgtacaagaactgatagaaaagtcaggtctttctacagaacaatggctcaaagcttatatgactgcgtatcttaagccagtgcttcagatttattaccagcattcgttatctattgatccacatggacaaaatgtgattctgattctaaaagattatgtgccaacacgtattgctttgcaggactttgtgggagatattttaattaatgaagaagcaaagaaaaaattgccacaggaatttattgataacttgtttaatgcctctccaaatccggaaaatgcaccgttaacgatacttatcgccatttttgatgccttcttcagatacctgagtcatgttatgattacaaacgctaactacacagagaaggaattctggaattgtgtttacgatattatcatcgaatatcaggcagaacatcctgagcttcaggaaatattcgacaagtacaatatgttcatacctgaattcaaacgtcttattttcaatagccgacgtttgtataatggttatgaagaaacggctggatttccacacatgaaaaaaagtggttttgtaccgaatccgttacatcagctaatccatgaagaaatagtaacagcaaaagaaaactaatgaaagaagcccttttaaaaacacgctccttctttggtttattaaggcgttctcttgccggaagtgaaaagaacttcacttctggcagcattaacaaaaccattcttttactgtcagttccaatggtggttgagcttctgatggaatccctatttgtatgttccaatctgttctttgttagccgattgggcacgaatgccatttcaattgcgggagcgaccactacttttatcactttttgttactcggtttccattggtttggggatagcggcatccgcgatgatttccagaagaattggcgagaaaaaattcaaagctgcaggtcagaccaccatgcaggtgatttatgctacagtacctattgccgccctgattagcattgtctgtaccatctgtaccactgatattatgagtgctatgggactttcggctgctatggttgaggaaggaagaacttacggcatcgtcatgtttgcttccagcggatttttgattcttcgaatcgtcgtaaatggaatctttcgaggtgttggagacgcttcgacagctatgagaatactttggctttccaatgcattgaacattgtactgtgtccagtattcatttatggctggggtcctgttccggcatacggtttattgggagttggactggctactttaattgctagagtaattggagtgttgtatcaggcctggtatctgataagggcaaaaaccatgttaaaaattggtctggcacaaatggtcttcaatcttgctattttcaaaagagtactaaaactggcttttggcggtaccgtacaatttatcattccggcatcaagttgggtgttcatgattaagatcatgtcgcattttggcgagagtgctcttgcaggttacattctggcacaaagagtcacttcgattgctacgatgccggcctggggtcttggaaatgctgcaggaatcttaaccggacaaaatctgggagccaaacagcctgaacgtgccgaaaaatcggtttggagagcgggaatgttaaacatgggatttctggttttaattggaatttgctggatattccttgctgttccggttataaaaatctttactgacattcctgaggtgatctcttttagtaccatgtacattcatctaatttcgatagcctacatattattaggttatacgatggtaatttcaagagcccttaatgcggccggcgaagtaaaagtggtgacctggctttacatcctgatgttctatgtcatacagattccacttgcctatgccctgggaatttcttttgatttgggttccaatggtgtttttacggccatccttgtttcagaaattatattggccgtggcttgtatcgttgttttccgaaaaggaaaatggaaacatacaaaggtttaaaactaaaccggttcaaaatatgtcaccccgttggggtttattgaaacgattttaccaatttctataaatatttcgccccgatggggcttagcatttgtgaaaagatccaaaggagcatcatatttatagcatttataacgcattttttgcaaaagctccggaggagcgtcatatctatagaattacgttccgatgagataacatttgtaaaagctccaaaggagcatcatatctatagcatataaattacatcacaaaacattagacaacaaataataaatatcaatttaatattaaataatagaacaatgagtacaatagaacaattacacggagtatttgcaagagcttttgaaattcctgttgaggcagtaaacgacggactggaatatcaggctatagccgaatgggattcgatgagtcatttggtattagtagaagaacttgaaagtacttacaaaatctcaatcgaaatggaagacattctggagatgggaagtgtagcaaaaattaaagacattcttaaaaaatacggatttgaaatcaattagaatagaccactaaacttatggaactatacgatttaatcagaaaaaatgaaaagctgacttttaccgacgccagtaccggagtttcaaaatctattgcagaaatggatcagtcactggaaatcgaaaacatccgttcagttgtttttatttacaatgacaatcagttaccggctattgaaacgcttttaaatttttaccagagcaggtttacgattgctttgttgggaatgggtttactcgaaaattttaaggaaaatctggaacagaaatatactccttattatatctatgaccctacgcgaactgaaatagaaggctatacggctgtaaatgcatccgaaacgatagtattgtttaaacgaaacgtaaatttaatttacccgatacatgccaaaataaaacttttgctaagcacttccggaactacaggatcgcctaaatttgttaggctttctgatgaaaacctggtacacaatgcaaaatcgattatggagtatatgccaatccggtcagatgatgtagtacctttaaatgtaccgatcaattttgtgtatggcttgtcgatttttaccaccaattgtatcaaagccagtcagattgtttgtacagataaagatgcttttcaaaaagaattctgggccgatttcaaaaagtacggatactctaccttaggtggagttccgtacttctatgagatgctgtacagtattggattcttcaagaaagatcatccttccttacgttacctgacccatacgggcggaatgctgaatcacaaactaattgaagcaatttcagattttagtgagaaattcggcaaacaattctttgcgcagtacggacaaacagaagcttccggtcgtatggcttatttgcctccgaaagatctgttgcgaaaaggaacttctattggtttaccagttaaaaatggacgttttgagatcgataacgaaacagaggaactgatttacattggtcccaatgtctatggcggttatgctaatgtgagagctgatcttcagttttatgaggaacaggaaagactccacaccggagacaaggccagacaagacgaagaaggttactactatattgtaggccggatcaaacgaatcgtgaaattgttcggagtacgtctcaatcttgacgaaacagaattgttgctgaaagatgcattgggcggacaaacgtttatctgcctcggaataaacgataaacatctggccgtaatgtacaccgacgaaaatatgaacaaagaattgattctgaaagtgctaaaagccaaactaaatcttcacgccagttctttaaaagtgatgcacatagaagacgttccgcttacaccaaacggaaaagtaaactatcctttacttaaggagtcactggaattagaaggggctttataggttttaagtattcagtcgcagtttgcagtttgcagtcgcagtagtcagtcacggtaatcagtatacattaaaactgagcactgtgactgaaaactgtgactatttcttttatctttcaaaacaagtcgcagtattcagtcacggtaatcagtacacattaaaactgaaaactgcgactgaatactgtgactttttttacccttcaaaacaaaaaaaggctcctgacaaaactgcgtcaggaacctttaaataaaaaaacaaaataatattatttggaaagctatcttttagaagctataccccagtgctaaattaaatctggtaccgtttcctcttgtataattggcatttgtaccaaaaaactgcgaagttgttggataataatctgtattgaatatattttcaattccaagtttaacacggatgctatctgttactttataagcagatgccagattccataaattgaaagaatgaattggtccttctccaatggcataagctcctttggcatttggtttgaaaacatcacgatcaccaacatacatccagtacaattcaacatttaatcttttaccgccatactttgcgtaacctgtaattttaaccggaggaattcggtttgatttcaaataaatatcgtttggtccgtaaaagttcccgtcagaatctttatcccctcttccctgtacattggcatagttaccccctactgtcaattccttaagaatttggtaatcggcctgaacctcatatccccaaactctttccggcaaacgttctgctactaaaaatccgtctacctgaatcaaattggttcctaattttgatgtactcaaataataagaagcacttacattgaattttcctaactgactgctaaaacctccttcatagttgttgacaataattggttctgtctccaacttagagatggcatcctgttttgcattggttaaaacccttcctaaatcaaatacagaaaaagcctgagaaaaactcacaaaaggattgaagaatttaaatcttgaatatcgaatacctgtgttaaaaacaaaagcatcataattaagttttcccccttttacagcaatacttcccgctccatttgcaccggtagcaagagtattgtaatcatcgatattgattttaatgttttctgcacgtaaacccgcttttacattccagtcaccaaacagctgtgtcgataattgtgcataaggtgccagattgaccatatcgatgttcggaacccaaacacgtccgtctaccagtttttggttcgttttatcgttcaataaatcgaatccgtaagtcacatcacccgtgaagtttgacgaaattacaaaaggagaattcaaatatactcttaccccttttttggtagatgccgtttgtgattgtccgcttccgtagaaaaaagtagagttagaaaatgccgtcaggaaatcctgaaaatacaaattcgctgtaagtgaagtgctcccaaaaatccctctgtttacatactgaagattcgcattgtgattgtaacgatttccttcgtctacaccaggcctgtttcccaatactccaattgcaggacttactccgtatactccatttttaaggataaaatccgaatcctgattcgaactgaaataattgtacatgaagtcaattctttgcttaggggttaaatcgtaacctactttagtaaacacattatacgttttagtttctcctaatccgtactcaggagaaataaccttccctcctccatcacgaaaaacacccgttttttcataagttccgcctaccatatagttgaacttactgattttcccataaaactgctgattgaagcggtatcctaatgtactgtcaccttttatatttccgttagttcctgcctcactgtatccggcgaatttcttttgagttttacctgattttgtaatgtaattaatcaaacctccgtcagcaccatttccataaatagcagttgctcctttaatgacttcgatacgttcaattacagaaggatctatagaacgcagctcacgtcctgcagatttcaatggcgtcgattgcggaattccatcaatcaaaactaagggatttctaccgcgaagtgtctgaccgtaattccctgtattgtttgtacccgatcctaagcctggaaccgcaaatgccacaatattggcaatatttggactcacaatcgataaatcttcaatatccttagcattaatgacagttaccgaagaaggtgtttttgataaagtttctacttttctactggccgagacgattatctcatctaactgatcgccattctcttcagaaacgttggtttctttaccattaaatttcaattgcaaagtcacattggtcgtttcattgttggcaaccgtaacttcctgttcgatcgtttcgtagcccgataatgaagcttgcagagtataaatattctctgctattttgttcagtctaaagctgccgtcgctatttgaaatggttttatatcttgaatttttaagtgtaataataactcccgaagccgattttccgtcagaggttgtaatttgtcctttaatttttccaccattttgttgtgcaaaagaagaaaataccgaaaataaaaggctgataataaataaaaactttgatgttcttaaactaagatatttcattgattttaattttttggttagtgattttattcttatttagaattaataaaaacagtgcaaaaataaagattaataattgtttaacaagtattatttcgatttattctatagaatttttaataattcatgcacctttgtcagaaaataaatcagtttcttgataaaaaagcaatattacaacagcatcagcttaaaaaattgtacgaatgccacaaaacgaatcaaaatcaatctgtaagttttctcttctcaaagtttaagactactccattcaaaagttaataaataagcatttttgaggttttacggctctttttttcattcaaaaaacaaagatttagtctaaataagtataaatttgcgacgcattttctgtggattcaagtttaattctaacagaaaatgataccattacggtgtgaaccagagtgcctataaaaccaaataagctactaaatgaagaaaggaataaaaaaaacgatcagacaaatacatttatggctggggcttggctcaggtttaatcgtttttattgcggccttaaccggcagtattttagtttttgaaaaagaaattgactcattcttacatcctcaatactatcaggtttcatctgtagggacgaccaaaaaaacaattgattattgtacagacgttcttcagaaacagtacggcatcaaaaaaattacccgaatttataccttcaatgatccttcgcgtaccttccaaattctggcaaaggatgccgataaaaaggcacagtttttttctattgatccttataccggaaaagtgctcgccacaacacctcaggaaagtcggttttttgtagtagtgctttccctccacagacaattgctaatgggtgatgccgggcagcttattatgggatcttcctgtattatttttgttctgatgctgctcacaggtatggttttatggtggccgaaaaagattaaaaatttaaaacaacgactaaaggtaaaatggagcggttccttcaaaagaatcaattgggattttcattctacttttggcttttacagcttcttagctttgcttattatttcgctaaccggtctttcctttgcctttgactggtttcaaaatggcctttatttaatggccgatggaactaccagtaaaaaagtgtctttaaaagtaaagaatccaacaaaaatagatcctaaactcaataatactgctttttatcaaagtatttacaataagaccgacagtatttttccttataccggaaatatccaaattagaatgccggtggatacaatcaatagtattacggttctgaaggaagatctggaaagaatcattccacatcaatccagctcggcttattttgataagtatacagcggaaaatattgaaaacagaccttacaaatcctattcaaacggtgacaaactgaaacgtctgatgtatcctattcataccggaagtgtttatggattgaccactaaaataattgcttttttggtttgtctttttgctgcgacattacctattacaggactaatcatttggctcggcagaaagaaaaagtagctttttgacgaagcaaatcactttattcagttgttgtatttctttggaaaaattttcttacctattcggtaattaggatccttttgctgtgttcttcgaaataaaaataatcgtaagttgttatatttcaaaaaattacctaaatttaatccccccatttctaataaatctttttaggacttgtttaatctgttggctaaaatctcaagagcatgaaatggttcaacactttagtaataaaaaagtttacggaaagactttcaaaacccgtttctaatgatggttctcttcatttggaaaagggcagacagttttatttgtcgaatcggtttcaggatgccctgcttcatttaaactgtgcgatcaattccggatttgatcagggggtttatgccttaagaggaacctgtcttcaaaaactggattaccattataatgccattgaggatttcgacaaagccattgaaactgatcctttagagttttctatttactacaatcgggcaatatccaaaagagcaatcttagattttaccggtcatatcgaagatctgcacaatgcaatctattactacaaaaaacattcaactatcgaaaatcaggttctcaaagcttttgaaagagatttacagacagctaaaatggacatagatggtccaatacaaaacaaacatgaagggcgtaaaactccacctcttgaaataaaatttctgattagagagtcactcaacctcattaaaaaagccagggtaagaaatgtcacggtgaattgatttcgctccttttttataaaacttcttttttgttttaaagccgtactaaaaaaagtaaacggatgatactgattcgctaggcgaaaacgcggattttcacggattattttttgttttatctgggataggattattttatcataataatgtcttttattcctctaaaaatccgttttgatccgtgttttcgtgaaacgaatccgtataatccgtgggctataatcctagctatagaaaatacaaaagttcacactaagacttctcttcttttgcaactcacccgctaattgtgttatatttaccatactaaactgaagttttattatggaagattttttaattggtattggaaagagattaaaagagatcaggaagaaaaatgcattaaccatacacgaagtagccaacagagccggagttagcaacggtttgatttccagaattgaaaacggaagaacaattccttccctacccgttttgattgaattgatacaatccttaaatacggatgtgagttatttttttgaaggtgttgaaaataccaagaatgcgaagtacattcatattaaaaaagacgattatcaaaagatagaaaaagaggaccgtgccgaaaccaccggttttaactactatcatattttcagtaaaagcattaactctattggttttgaagctgtaattcttgacgtggaacccaactgtaaacgcgaaaaagtaattacagatgcctgggagttcaaatacatcattaaaggaagtgtgacttatattattgatgatgcagaagtggttgtcaatgaaggtgattcattgtgcttcaacggaagacatccacacgtgcctcaaaaccgaacaacagagaactgtgtgatgctcgtgctttatttttattctgagagtaatagttagtttttttttaccgcaaagaacgctaagtttttttagagctaagactttaaaaaaggtaaggttcgcaaagctctatagatagaactttacgattaaatagctactaagcttgtcaatatcgaccgaaggggactcgaaggacagtgaatagacgaagtaaattacacgtaggatacgaaaaagattggcgacattctgtatcgagtttctaatgtgatttctctcttcgatcgaaatgacacaaaatgagaaaaaaaacctttgcgaaccttgcgtaacatctttgcgctctttnnnnnnnnnnnnnnnnnnnnnnnnnnnnnnnnnnnnnnnnnnnnnnnnnnnnnnnnnnnnnnnnnnnnnnnnnnnnnnnnnnnnnnnnnnnnnnnnnngatttctctcttcgatcgaaatgacacaaaatgagaaaaaaaacctttgcgaaccttgcgtaacatctttgcgctctttgcggttaaactcatccctttacattaaaaaaacttcgcgaaccttgcgtaacatctttgcgctctttgcggttaaactcaagaccaaaattaaatcaaaaaggctaccttcaaaaatgaagataaccctttaaaaaacaataaaacacaaatttttaacgaagcaaatcacacgtgggattcgaaaaagattggcgacattctgtgtcgagtttctaatgcgatttctctcttcgatcgaaatgacacaaaatgagaaaaaaaacctttgcgaaccttgcgtaacatcttagcgttctttgcggttaaataaaaaaggctaccttcaaaaaagaagataaccctttaaaaaacaaaaaacacaaatttttaattcgctgttggaagccatgaacggccgtctaatgaccagcttgtattgatgggtacaccaaaccattgtaacgaagaataggcgatatctaccattttaggaactgctcctgttgcggtaccacattttaaggaggctgtagtgtttatccatgttggagtatttggaaaagcaaggtttacctgctgaacgcttgaatcggtaaaactgtttcctgatccgttatctcctttccaatatccaataagattggagtaatccggatgtgaagcggtaaccgaagaacaggtataatttaaaatcgaagcttccgataaggctttgttccatacacgcacctcagcaatatttccgtttacattggcaccataggttagcgttccgtcctgtcctatcgcaaaaggcagtccagaagtcagacttccgaaactggctccaatagcagcctgccccacaaaagcaccgtcctgatacgttttaaccaatttggctgtgcggtccaccacaagtgtcaaatgatgccatttcccatcattgattgtcccaccggaaatatccacacgactttgagtgtccccaatatttaccttccatgttcctccggtattggcgcagatgacaaaaccccgatttttaccactcacccagtttttattcgaaaccagcgaaggatcactgctatatcctgatgtttttacccgacactccactgtaaaactcgaagttccgaaattgtaaagtgcattagatgttgaagcataaatagaattggaattaaaattgacaaacttacccgttatcgttgtagtgggatcgaccggtttttcgattttagtcgacgtaaagtttttattgttgaaaatagtaaagatgtttcgttcttcgtaagaacttccgccatgagatccactggaacctgtaacaatccctccgtgatccggcgctaccacgaccaaccaatcctcattggcatagttaggtctgttctttaaagccgttaagatttcacctatgtaaccgtctgtggtttcaattgaagatttgtactgcgatacattaagcgaaaatccatagctgtgtcctgcatgatcgacatcatcaaaatgcaaaaacaaggcatccggattgtcgtttgtaagtgcggcaaccacttcatttttaacagccaaatcggtagtgagtgttttctctacatcaatgccattcacaatataggtattgatgggtgcccaatgcacaatcgacatggtttttaaagcagaattatacgtttcaagtcttttcaaaaaactaggatacgaggtaaaattcggactcgaaaatgaattatcggttacgccatgtttcaaatgggtcacgccggtaagcatcgtcgaccagccgtttccgctccacgtaggtgcttcggtcaatgcatctacactgtaaaccgcattgggtaataaagcatgaacattaggagtgttggctcccattagagcatcgccgcgacagccgtcgattcctataatcagtaattttctggttccactgcttaaagcagatttgccggttttagagtttgctttagcatttactgcctgttcgtctttcgcaagcgctgaatcgttggtacaggaagtgactaaaagcgcacttgcaagaattgtaatgtaacttaatctaaaaatctttttcattgggttgaattgttttatggttactatttatttacttgtttgaaacttttcctgcagggatattgtttttactaattgataattgataattgataattgataattgataattgataattgataattgataattgataattgataattgataattgaattcaaatctagagggtgtataaaaaataatttataaatatgtaatttttacatagcctccagatttatctggaggccgttctatttagggttagaatggctttagccaaattctattcatgtatctattgtttatgaaaatcaaatttgctgataaattcatcatattcttcctgaaaagcctttttcttatgatgaatttcttgatttttaatataatttcttactctgtctactgaagattctgaaacagaaacagcaaaatactcatcctgccattcaaatttttctttagttaatttatttttgttgatccagtaggatgattctcctttgaccaattgcattattttttgaatattttgatcagctcctaatgaaataagacaatgacaatgatccgaatatccgtttatagagtcgatataaattcctttttcttttgaattgtttcttatatgattccatactttttctcttaattccaaggaatttaagtatggaaacctgtttttagtactccaaacaaaatgaatataaattttcacaaaaggcatatcgataataatttaaggcatgtactataaactgagactgaaaactatttcctactcactcccgcactttcaaaactggccatttcattcagaaaaacttcagctgatttcagaattggaaaggcaatcgcacagcctgtaccttcacccaaacgtaaatccagattcagaataggttttgcatttaaataatctaataatttctgatgcgctttctcggcagaacaatgacagaagaccgcatttttatgaatagcaggatttatttttgaagcaattaagaaagcagtgctgcaaataaaaccatctaccaaaaggagcatgttgttctcaaaagcagttaacattccgctggcaatttgtataatttcaaaaccgccaaagtaggccagctgctgttttaactcggccggaccggtataattttcaatagcttttcgcagtaagttttgtttttgcagtaatttttcatcttcaacacctgttccttttcctacgcattcttcgatagagaatccggttagaaggctcatcaataccgaggcagtagaggtgtttccaattcccatttcaccaaaaccaatacaattggaaccttttctcgcaaggtcttccacaattgattttcctttttcaaaacacaactgtaactctgcttcactcattgcaggaaggtgtagaaaggattgtgttcctttggctattttggcgttaatcagattggcattggttggaaagtcataattaacaccggcatcaacgatggataactgaatgtcattttgcttgcagaagacattaatggcagcgccgccttccagaaaattagtcaccatttgtcttgtgacatcctgggggtaagcactaacaccatgattggcaataccatgatcggcagcaaaaacgacgatagcaggatttatgattttggggtttaaggtttcgaaaacagttcccatttgaaaagccaaagtctcgagagtccccaaagcgccaatgggtttggtcttcgaatctattttgtcttgtagctgagcgctgaagttgaaatcttttgagtttgctgtttttgggtttaaatttaaattcggaattagattttcaacggtagttttgatttccttacaatccggagcctctgatttttgtttccagtgtaattgctgcaacatgggttgattatcgtaattcgttgcaggttttccgatgcagaaataccctaagggctcaatgttttcaggtaaatcgagaatctttttaaactgataatagttcagaatagacacccagcccattccgtaaccctgctcagtgagagagagccagatgttctgagcagcacaaaccgaactgaattttaccgcttcattgctgccaaccgttccaatcgtaaattggttcagtacagatcggtcataagcgataatgagtccgattggagcttcctcaatggcctccagttttaaggatttatagtgttccttttgttcgtgattgtcggtaagttcctccgcttttttgttataatctaaaaaaagatttttgatggtacttttaaccgcagcagatttaataagataatatcgggtggcatctgttaatccaactgacggtgcccaatgtccggcttgaagtgctttctgaatgacttcatcaggaacttcatcctttgtaaaatggcgggtatcacgacgtgattttagtatatcgtctaaatggctcatttttaaattccaatttttaaattccaaattccaaaactttgggttgggggaatagtaaccgtaaagataaagtatcgtattggaatttgggatttaaaatctggattttcttttcatcattatccttttattttaacagggatgcccgaaaccattagaaccacttcatccgcgtttgaagccaaaaactgattcatccagccctgaagttcggtgaattttcggccgatatgagtttcggcatgaacacccattccgatttcatttgtgacaataatcagcgtagcattttcctgttgcgcgatggatagaaattctttttttgcttcctctaaacttaaagtaacctcatttttatgatcgacaaaaaagttggtcagccagagggtaacacaatctattaaagccacttttccggaaaagtcaatttcgcttaagtatttctctttttcaatattggtccagcgttcgtcacgttcctgttggtgtctgtcaattctgttttgaaaatcagaatcccattttctggctgtcgctacatatataggtgtatctgaaagttgtaaggccaggttttgagcgtaactgctctttcctgatcgttcgccgcctgtaattaggtgcatttttttgagttatgagttatgagttatgagttatgagttgtgtgggttagtcgaatgtcaggctgagcggagtcgaagcttatgttgagttatgagttttgagttatgagttatgtgggttagtcgaatgtcaggctgagcggagtcgaagcttatgttgagttttgagttatgagttatgagttatgtgggttagtcgaatgtcaggctgagcgaagtcgaagcttttgttgagttatgagttatgaattatgagttgtgtgggttagtcgaatgtcaggctgagcggagtcgaagcttttgttgagttttgagttatgagttttgagttatgagttgtgtggattagtcgaatgtcaggctgagcggagtcgaagcttatgttgagttatgagttttgagttatgagttttgagttatgagttttgagttatgagttatgtgggttagtcgaatgtcaggctgagcggagtcgaagcttttgttgaattatgggttaagagttatggttttaagattttaaggtatctataactaataactcataactcataactcaaaactcataacaattaataaggacaatgtcggcattcgtttccgcagcagcttcctctttttaagtgaaaccaggctttgaaaacataatttccgtcttccaaataataatcaattccttcgattagcttttcttgtttgggtaaagatatggctttatttttaagagctttttgtggggtaagcgtttctacgtaagcgtcaattttatcttcgcaggcttctttaaaacaaacagggcaaagacagtcgcctccttcggaaagattaaaaatagggggaaaatcattacaccaacacttgttttcatttgaagtatctccacagctgaaagaagattcacagctcgagcagactttggtttttatgggattcattagggaaaaatgatgtttatttgattttgtaggaataaaggtagataaaaaaaatagaaattgcgttacctttgtcagtaatgaaattgtaaaatttataaggaagacgattcaaattatatgccataaaagcagcgtgatgaaactgagccctttaaaaaaataatagaacttatatatgagacatttattgccaaaaatgatttttgttttacctttttttcttcttatcggatgcaaaaaaaatgaatcttcggagattgtaaaaacggaaactgaaaaaaatagtatcgaatatgcgtccggactctcgattataaagcacgaaggttattcggtagtaaccgtttcagatccttggccggatgcccataccaagtttacttatatactgaaagagaaagaggcgaaagtaccggacagtttgcaaaagtacacaactatcaaagtccctttagagtcaattgtagtgacttcaacgactaatattccgtttttggagatgttggaagtagaaaataaattggtaggttttccgcataccgattacatttcttcagaaaaaaccagggcactgatagacaaaggtgccgttaaaaatgtggggcaaaacgagaaattaaatatcgaacaattgatagagttatctccggatttaatagtgacttttggagtagacaataacaatgcgatgcttgataatttgaaaaaaagcggtttaaatgttttgattcaggccgactggatggagcaatctccccttggaaaagcagagtggattaaactttacggtgctttatttggtaaagaagaacaggcgaaagagttgtttgataaaattgttttgagttatgaccaggctaaaaaattagtagcgggaaaaccggcaacttcaagtgttttatacggttctatgtacgaagatacttggtatgttgctaaaggaaacagttgggtggcgcagtttatgaaagatgcacaggccaattacctatgggcggatttgaaaggtacgggaagcgaaggcttgtcttttgaaaaagtcttagtgaaagccaaaacagctaatttctggatcgctgcgggttcctttaaaagtttggacgaattcggaaaaagtaatcctcattatacagagtttgatgccttcaagtctaagaatgtttatacgtttgaaggtaaagcgggagcaacgggaggaacagtttattatgagctggcgccaagccgtcctgatttagtattaaaagattatatcaagatttttcacccggagttgttgccaagctatgaatttacttttgcctctaaattaaactaagttcattgattcataaaaaacgaaatataatgctgttttcggtactcggtctggccttattgtttatgttctttttagacattagcctgggatcagtgactataccttttaaggaagtatataacagtatgacgggaagccatgccagtaaatcgacctgggaatatattattgtcaattatcgtctgcctaaggctattacagccatgttggtgggtattggtttatcggtgagcggtttgctgatgcagactttgtttagaaatccactcgcaggacctgatgtattaggtttaagttcgggagcaattctggctgttgcgattgtgattttaggagcgggttttttgccttcatttttaaactcgattttattgtcgccgtatgcaattgtactggcttcgacaataggaagtgttttggttttactattggttttattggtagcacagcgtttacgaaatacgatggcaattttaatcgtcggattaatgtttggcagttttacaagtgctattgttggggtcttgacgtattttagttcagcagaacaattgcagaaattcaccttttggtctctgggaagtcttgggaacctttcgtggacttcgatttcgattttggcagtttgtgttgctttgggtctgtttttgagtgccggaagtattaaacctttaaacgccttgcttttaggtgaaaattacgccaaaagtatggggttgaattacaagagagcccgattgatcattatttttgcaacaagtattctggccggaagtgttactgcttttgcaggaccggttgcatttataggtttggcagtgccacatattgcaaagctcacttttcagaccagtaatcatacagttttatactggagtacttttttctacggaggaataatcatgttgttttgcgatatggcatcacaaatgccgggactagagactacgttacctattaatgccatcacgtctataattggcgcaccaattgtcgtttggctgctcatgcgcaaaagaaattttcagtaaataaattagccacagattaagcggattcaacggattttcgcagattgatttttaaaaattaaaagcggtgaagaaaaaacttagaaccttagcagcttagaaccttagtacctttaaacaatgactactattttaaaaagtgcaaaccttagtatcggctacaagtccaagaaaggagttgtgactattgctgaaaatctaaatctgaatttagcttcggggaaacttatttcgttaattggtgcaaacggaattgggaaatcgactttgcttcgcacgattaccggaattcagcagccgttgaaagggcatgtttttctaaatgaaaaaaatataagtacttataaacctctggaattagctcaaaatttaagcttagttttaaccgaaaagctaccgccaagtaatttgtctgttttcgaattagtagctttaggacgtcagccttacaccaattggattgggactttaagtcagaatgatatcgagaaagttcaggaagctttagagttgactcaaatagagcatctggcacagaaaaaacatttcgaaattagtgacggacaattgcagaaggttttaattgcgcgggctttggcacaagatactccattgattattctggacgagcccacgacacatcttgatttactgcataaagtttcgctattcaaactcctcaaaaaactaacagaggaaactcagaaatgtattttattttcgactcatgacatcgatctggcaattcagttaagtgatgaaatgatcattatgacccctgaattggtggtacaggacgcgccatgcaatttaatctcaaaaggaagttttgcaaccctattcaaagacgaacatattatttttgatgccgaaaaaggaaagttcgtaattacgtaacagacttgtcgaatactttgcaaaggggccggaatatcgtttaaaaggaaagaaataaatggctaactgtttttcagtccgatttgtctttttgcttctcctaccacaaaagccacagaattggcaatattaaagcttcggattaattttgacatgggaatggtgaggtgattctcaaaacgtgccagcacttctttactcaaacctacactttctttaccaaatacaagccagtctccgtcctgaaaatcagtttcgagatatgatttttcggcatgggaactcatcagaaaaacacgtgactgatcagggatctgttcaatccattcttctatattttggtattcggtaacgtcaagatgtacccagtaatccagtcccgaacgtttcaggtttttatcgttaattacaaatccgaaagggtgaattaaatgtaacctgctttctgtacccacgcacaaacgtccaatgtttccggtgttattagggatttcaggttctacaagaactatgtttagcatttttttgagttatgagttatgagttatgggttatgagttatgggttatgagttatgagttatgagttttggaatttgcgatttgattattgagttatgggcaactaattaagcgccccggcaattatctaattattaaactgcctcattatctaattcaaattgggttacttccagaacctctccggcttttaagttttgcaaagatacatttcctatgcgaacacgaaccagtcttaaagttggaaatccaacagccgcggtcattttccgcacctgacgaaattttccttctcttattgtaatcgacgcccaggaggttggaccatggcgttcatctctgatttttttggctcttggaccaaaatccggaatttcagtaacgataaaagcggtgcagggtctggttttgtatttaccgccatcaaaacctatttcaacgcctttttgtaaggcctcgattgcttcgggagtgatgattccgtcgacctgaacgtaatattctttgtctacctttttgcttcttaccagttcgcttatccttccgtctgtcgtcaataaaagtaaaccttcagagtcttcatcaagtcttccgatggccatagtaccttcggggaaattatataattcccctaaaagctttttcttccttttcaattcataaataaactgacttagatagccgtaaggtttaaaaagaagaaaatgatgatgcatatttgttttttgactgcaaagataactttgtttgcagagtttaaaaggaaatcttaagatttagatttttcatgtttcattttttttagccattgcagaacaaaccagattgccgtaattgcaaataggagtagaattgggaaataataatttttgaaaaaatcatgaaagtaacttccagttaatacgtaagctgaagcgatacacaatttgattccaataaattcagcattagaccaggaagttttgattttgaagaagttcataattctggattgaattgttagtaactactgttaaaatggttatttttttaaagtcaaaaagtaatttagatcagatttaatcctttttctgtctttatccagtagatagatcttttcaggattagaactgtaataaccatagtacagctgtttttcctccggctgatcccagtttaggacataaattgtaccgtccggatctttatctaatcctctttctgtattaaaatttcctttctgtgtaaagacatttccgggttcttttccctgatagacacttattagttcaaatttattgttttgtgaaacgctataatcggtgtagattttcaaagtcatttgaattccgctacaatcagcacacggaattattccttcatagattgttgttttgctgaaactgttgttggttttagtgaccgtttccttgtttgtagtattgttttctttagttgtttttgtattgcaggacagtagcagagaaaatagagccgaaaagataaataactttttcatgttgtatcgtattagttaaacctaaaacgattttagggtaaagaaaattgtacagatagaaaaagggaagttaaatgatttatttttcagctttagaagtgctaatcgtacagactaatgagaaaaaataatgtcgttaaaaaatatttaggggtaaattaagcccgattggttttgagacagagaaattttaaaaaagaaataacttgttaaattgtaataatctcttaattcatacaaaagccaaatgttttgtgaagtcgcgccagatctaagaataatggaaagaactgacggataatttgtttattgttggaaaattttcacaaaagcgcgatacgataagtttatgttttcacaatattctgttaactttaaagaatataaatttgatttctaaaaactctatttttaaattacttatgaaaaaactttacttttctcgccagcttttggcttttttatgtttttctggttgcttttctggagcggttttagctcaaactatgcctccagtgcagtccattccgtataaacaaagttttgatgggttaccggccgccgccgacacttatgttgatattcctggttttcagggttggacagctaatggcggaaatcaaaatactgctgtctggagtacaggattaactggagatagggcattagtgaaaaatagtaattctaatgtcaattcgggagggattcataattatgacgataaaatcgggtttttgaattcaacatccggagattttgcaattggttttgcattttcaagtttggggagccaaacagttaacgtatattacgatgcgatgattattcgtaatttatatgatggaggaagcaacaatcgtttgcaagaaatggcattacagtatcgtgttggaactaccggtgcttttaccactttatcacctgcatattcaaacaacagtacaaccttgcagactacagcagcagttataactccattagacttaagaactacacgtattaaagtaacattacctgcgagttgtgataatcagcaaatagttcaaatacgatggattgcccgactgatttccggatctgtaggttcacgtcaatcttttgcaatagataatatcgatattaatgcggatcacattgcaccggtaaacgaagcagggttcccgaaggcaacaaatatttcatcaactaattttgatttttcagataagttagatgaaataggaaaaacttattatgtattgcttcctggcggaagtactgctccaactgccgctcaggtaaaattgggacttgatgctagtggtactgcagctctgcagtcaggatctttaaatattgttgataaaactctggcttatactaaaaattttgcaggtttatcagctgcgacggcttattccgtattctcggtttctgaagatgcgtacgaaaatattcaaagtacagtaactaaagtagacgtaacgacaacggcagttgcattaccagagataacaacaacagttagtgcacttgatttaggtgcttctgagacaaactttgaatcaggctctaaaagctatcaaattcaggcaagtgaccttaaagacaatttagtgttaagtgttactccaaatttttcaatttcaaaagataatgtaacctttggttcaacactaacatatactgcagctgactttgcatcaaatgcgtccaagacggtttatgtaaggtttaatccaaatttattaggtgcctttacaggtcaaattacacatgaatctaccgatgctgttgcgaaacatatatcactggcaggaagaggaattaacccgtatattcaaaattttgatgattctaatgtgttatctaacagtggatggacgcaatacaatttggaaggagctgccaataaatggacttatactaatgctgccagaaatataaattctggaacaggagcagttcttatgaatggattttcggatagtggagcaagtaaagattggttgatttctccaaaattgcgtttggatacatttgataagttaccattattgtctttttattctcgtaagttttatgcgggacctggcttaaaattaatggtttctacaaattacgacggtgttagcagtccggaaacagcgacttggacagaaattgatggaagttttccaactattacaggaacttacacggcatctcaatatatagaattaacagcttataaaacaaatagtacttatctggcgtgggtgtacgaaacgacagcaggaggatctaacaatgcttcagagtggtcatttgatgattatgcaattgcaaatgaaacgggttatgtagcttcaaatccggttttagattttgggactgtagatcaaaatacggtttcgacatcacaatcttttgcttttaaagctaaaggatatggagacgttacgattaaggcaccggttggttatcaaatatctttggataatactttgttccaaaatagttttacattgtcagagacagatgctttggcaggaaaaacactttatgcgcgattcatacctactacaaaagaatttaaaattggtggtacattaacagtaacaggaactttgttaaacaaacaaataggttctttaacgggatcttctcttccaaaagcagaaacttacgatgtggtgacttataatttggagttttttggtgctccaactgcggcttacggaccaacgaataaaacgttacaattggaaaatgtagcaaaagttatgaataaacttgatgcagatgtatatgtagttcaggaagtttcgagcgatgctcagatcgatgctttgattcagaaaataagtgtgaatggaaaaacattcgataaaagtatttctacgtcatggtcctattcatgggatccaaattcagatccaagttttcctccacaaaaattggtcgtaatttataatacacaaactaccacagttaagaagacacgtgttatgtttaagaaattttatgatgaattacgcgctggtaccaaaactttgaataattatccgggaggatccagcagcagttttttctcatctggtcgtctgccatatatggttacagttgaaactaacttaaatggaattaaaaaagaaattaacctggtcgatcttcatgcacgtgctaatagtggttcggacatttcccgttataacatgcgtaaatatgatgcgcaggtgttgaaagatagtttagatgttcaatacccaaatgctaatattatgattttaggagattataatgacgatgtaagtaaatcagttattgcaccaaatccatcttcttacgaaagttttgttacagatacagccaattacaaagcattgactttagaaatcagccaggctggggcatttagttttctaagttcaggcggatttttagatcatattatgatttctaatgagttaacggatcaatatatttcaggttctactgcagtatatgatcctcgaaatgatattgcaagttacaccaccacaacttcagaccacggtccggtaattgcccgttttatattgaactcttcaaatctgtcaacaatcgattttgaaaccaagaatggttatgcggttcaggcttatccgaatccaacaaccgatgtggtgaatgtggtcgtaaaaaccaatacagataaaaaattgaaattgaagttctacgatgtttcaggccatttattagggaatccgattgatattaatgcaacgcaggatataagtactacagctgttccggtaagttatttgcaaacggggatttacttttatacgctaactgagaataataaagtagtttataaagggaagattattaaaaagtaagaagtaaaatgtgaggaggaaattgatttatggtttcttttgaacagtttacaataactttcagtaaaaaagtaaaagcagtccaaagtaaaatttgggctgctttttttatttaaaacaaggttttgaatggtttcagatttgtttcgggcgtaatggagtaaaagtaattcaattgccattgctgcgttttctgcgcttgtttacttgttgtttcatcccaaggaggatatacccttgtagctcttttaccttcttttttcgaagtggtaaaaatacctttctctaacaaaacagatttaggaaaaacaaattgtccatagagttcgctctttcgaacactgacgatcacaaagtcaatagcgtctgtgaaatcaaatggggcaataattcccgccgtattgcgtttccataaagttacaaactgacctgttttggtgggcgtgattttcgcttttctgtaacagatgtttttctgattcagtcgaaaacggtaagcatcatactcattgctttcagcttccggttgaggtagtgtgaggtcaaaatcgcaacaatcgtaaagtagttctttggcaattctaagatctttagggagagactccggatcagtcccattgtttttgaggatcattttatcgttttttctaagtaatttttgggtaaaactaccacaaaaagaactttaaaaagtaacattcaatccaaaatttaatccccattgaaactgattaaacgattggttgtttaacggattgatataataattcatggctggctctacaaaaacacttgttttcttgtaaacgcgatattgcaaagtactactcagggtagaaccatagatgaaatcattggcattgacattctgaccaatcgagtttccgtttaaggccatgttatttgaaatcagttttcccacaaaaccaccggtattgatattgatgttggctctgtttttactgaaaacagaatacgagacctctaaaggcatttcgatatatcttaagttttgatccagattcccgctctcaatagagttgctttcaatgttattttgttttaacgcatttgtagtgtttttagaaacaaaaatgtaacctgaactagtgctaatttgaggagctgctgcgactactgttgcattttgattaaaatagtcattagaagtcatggcagcattaggcggaccattgcttatgtacgatacatcggcaacactttgtcctaattcgttgattttaaaacctgaaccaacggcccattttttgttgattttatattttgttttaacaccgtaggtacttccctgttttgagtcgtttacattgcccagcgttttgtcatttttataattctccgagttggccaatccggcaaaaacttcaacggcccatctttctcctttagaaatgctcgttttcttttctttttcttttttctcctccggattaataatgcctttttctaaattttgaagttctgccaactgaacggaatcctgcttgcttaaaacggtactgaatttcgaattgttttttgaattacctgttaattctctgccagggaatgcgttttcaagagcagttttttgatgcttatcagaaagcgggttcacagcacttaaagctgtactaatgttatttttagcaggcaattgttcttcaaaaacagaagtcgacactttattttttgaatttggatgaaaagggttggcctttcctgcactaaaagtttgttccgctactatttgattagcagcttttttatcagcactaatagaatgattttttgaataagaacccaatccattgtttttaccaatagtatatactttctcagctacattttgattggaactctttcgctctgtatttaaaaattgatttgttgaagcggaattgaatgcatttgatggattcgattgggctgtatttgtttttgctgagacaattgctttttgggttgcagtatgatcttcatttctcttttgaagagtggagttcagattcgcattccctgaattcgccttattcgttacatcagaatgagcaactgccgttttttgattgtgattttttatagaaagctcagacgaattcgtaccgttcttcagtgaagaattactaacggtatcatttgattcttgctgagtggtatttacaacagtattattctctttactttgaattgtttggttagagtttggattgtttttcttctcatcaagaaccacactattgttttctatcgagccattttttaccgtttgaattgccgaagtagaggtaaaatgtaaaacagaaggaagcagcaaccctaataataagcatgcagcagccgaccaccaaagaatagctttcttctttttcttttttggctggtctaatttttcttcaatctgactccataattcaggaggaggaacacttgaaaagttttccattgatgaaaaaagatcttctatattttgctttttcatgctattttaaaattttttatgctcattatttttttttgcaaaatgcttttggcccgatttagatttgatttagatgttccttcagagatttttaaaagttcggctatttctttatgctttagcttttcaaaaacatacaggttgaaaacggtgcggtactgatccggcagatcccgaatgtattccagcagtttctcctgttcgaccggagcaatatccaattcctcctcctcgacaaaatcagtatccggatcaaaaacgtctaaaaagaaactctcttttttcttcttgttcagagtttcaatcagcttattaatgaaaatacgttttagccagccttcaaaacttccctcgaatttatattggccgattttctgaaaaacgatcacaaatgcctcctgaaatacatctttggcatcgtcttcatttctcatatacttcaggcatataccatataaaacaggagagaacaactgataaattttcagttgtccttctctgtcatttttgatgcacagtcgtatgtatttttctaaatcgtctttcaaaaaagtggtttgtttggttttgcaaaaatagttcttataagcttataaaactaccttttgtaaatagtacgtgatgcatcggtattattgctgacaatggttaggttttgattgtcaaggttttctatgatataagtcttgccttcaaaagtgattaagtcatgttcggcctgatcaaagtaaccaatacctttttcaattgtataggtgctgtttcttatttcaacattgtttttgtacgtgattactcttccgtttggtgtaaaaacgacttttttgttaaatccgattgttttaggagttgccgtataaggattactgtttcctccaatcgatttttcccaaatccaggtgtttacaatcgaacccgaattcatacccgtagattccactgaatatgccgacgaaaagagaccgcatgcgatgataaataagaaatactttttcatgaatcagattattttagacttgttattttatcctgaatagcctttttgaatgcctttatttcggcactttgatcggcagtatctttgttgtcgatcgtaattttagtgaccattataccttgacgtaattcaaaatatacccctccctgatctgcagcgtccggagaaccatatgttttcgtttttccttttaaagctaaaatctcagcaggtaccgattttaagaatagcgtgtaatctccttttttagtagccgccgtatagcgatattgatcgaaatcgtaagcaccggctttaacgtttaagaatttttgaatattaaaatcattgatctgatagaatttttgacaatcggcacctgtacattgaccgctgaaacttcctattacgacattgtcacggttgtctgctactttattgaatagtattgttttagttgtttttggtatcaaaatgaaatctgacggatacgttgccccaggagcaactgtctcacccacttcaggttctttttcgtagtaattgaccaaaatctgacatttgttttgaacaatgctggttattttaattttaaaaccgcttgtaggtttaagtcctgagaaaataccaacaatcatttcttttgtaaaatcgataggtgtaacggtagcgtttggacacgtattctcttttttagagaagtaagcattcaatctttcttcggaagcagctaaaaatgcaacaggattggtaggtaaagatttaacactatagttgcataaaagtggaattcctgtaaaagctaagtcttcactttctccgcaaactacattcatatcttcattattaagggagcaggcactgaatccaaaagctataaacaagcttagcattaattttttcataacaatattttaatagtttataattagtagatgtcttcttttggaaatggttgcgtgaaattttttattttttttaaaaataatgatttcatttttcgagattagggattcgtgaaatttctaatttagaataaagcactgcgtattattgtgtacttttactttatataaaaatgtaattatgtttgaatttcttccgtatttgttagcctttgtagctgcgttatttctagggatatatttaggaaagacgttatttgctgcgcgatttcaatccgaaaaagtgagcctggaagaaaggttgagtgctaccacaaatcaattgcaaattcagaaagagcagtttgaaaacgaaagaagaaattttgaaaaacagcttcatctgagcagttttgaaaaagagaatatccgaaccgagaaagacagtctcgcgattcagctttctaaaaaagaagtcgattttgaaaacttgtgggaacgtcataaagaacaaaagaatgaagtaagcgaacttcaggagaaatttaccaaagaatttgaaaacctggcgaataaaattttggaagagaagtcggcaaagtttacggagcagaatagcgaaaatatgaaaagcatcctgctgcctttgcaggataaaattcagggattcgaaaaaaaggtagaacaaacgcacaaagaaagtattgattatcatgctgctttgcgtcagcagattttaggattgagtgaaatgaatgcgcagatgagcaaagaaaccctgaatttaaccaaggcgttgaaaggtgacagtaaaatgcaggggaattggggcgaattggttttagaacgtgttttagaaaaatccggtttagaaaaggggagagaatacgaagtacagcaaagttttacaaatgctgaaggaaacagagttttgcccgatgttgtaatcaatttacccgacggtaaaaagatgatcgtcgattcgaaagtttctctggttgcttatgaaaaatggatcaatgaagaatctgaaattcttaaaatggacttcctgaaagaacatgtgaactctattaaaagacatgtcgagcagttgggaagtaaaaattatcatgatttgtatcaaatcgagagtccggattttgtcttattgtttatccccattgaacctgcgtttgcgattgctttaaatgaagattcgactttgtacaataaagcgtttgaccgaaacatcgttattgtaactcctacaaccttgctggcgactttaagaactattgatagtatgtggaccaatcaaaaacaacaggaaaatgcctttgaaattgccagacaggcaggagcattgtacgacaaatttgagggatttgttaccgatttggtgcgcattggaaataaaataaaagacacaaaaacggaatacgaaaatgccatgagcaagttggtagacggaagaggaaatctgatttcaagtgtcgaaaaattaaagaaaatgggagcaaaggctaaaaaatcgcttcctgaaaatattattgccagagcttctaattcagatgaaaatcaatctttaaattaaaaatgtagtttcatcaaagctgttcgcaaagaaactttcccattcaaatacaaataaaaaattatgactgcagatttcaaacacgtttcttcatcgaaaataagcatatcagaattaatgctgccttctcatactaactttagtgggaaaatccacggaggatatattttacagctgttagaccagattgcttttgcatcagcctcaaaatttagcggtaactattgcgtaaccgcttctgtggatacggtaaactttttaaaacctattgaggttggagaattagtaaccatgaaagcatcggtaaattacgtgggaagaagctctatgattgtgggaattcgtgtggaagctgagaatatccaaacgggagccatcaaacattgtaattcttcttattttaccatggtggctaaagataatgaagggaaaagcgtgcctgttcccggacttattttgtctaatttagaagaggtgagacgctttagaaaatgcatcaaacaaatcgaatctaaaaaagaagtagaagaacatgcaagaatgacagacgttaattctattgaagatctggcaaatttaaatcagtacaatgtgcttttagaaattcactaagagaggactcggaggtgagttcttttggtaaatagtgagatgggtttttaggaagaagaaagaagaaagaaggaagaagaaagagagaaacgaagtcttctgcgttttattacaagtgaaacgccttttttcggttaggaaactatgtttctatgtgttaaaaggtttttatgttccttacacccaattaatatatttttagaatcaaatcaaaaagtaatggtaaagtttggctatacaattttatacgttgaagaagtagaaaaatcggtttcgttttatgaaaatgcatttggattttcaaggaaatttgtaactccggaggcggattatggcgaattgagtacaggagaaacaaccctttcgtttgcttcaaaagaactagcagcccaaaatctgaaagacggttttatcgaaagtaaaccggagcagaaaccttttgccatcgaattggggtttataaccgatgatgttgaggaattggtgcagaaagcaattggtgcaggagcgaccctggtcaaagaacctgctcagaaaccatggggacaggtagtggcctatgtacgtgacccggatggatttttaattgaaatctgtacgccaatgcaataagatttcgtggagtttctgatgtcaaattggagtgcctgtaaaccggatcagaattgatttttagtcaggtaaaacattcacaaatatttagcagtaaatcgacaaccgtaatgctgaaaaaatcgtaactttaagtataaatgattgggttactgttttttcacggagtactgccattctattttttaaacttatcttaagtccagttatttctcttcttaaaaatagaaaaagatcgaatgacataattgtttaattattaacgattatgaaaaaaattacattacttattttactgtttatcgcttattccgttatggctcaggataaattttttaccagtacgggaaccataaattttgaagcatcagtgccctttttcgaagatgtaaaagcggtaaacagacaggtcacaattgttgttgagcccaaaacgagtacacttatctgtaccgtttatattaaagattttcgttttaaactagacctgatgcaggaacattttaatgaaaattatatggaaagccgtcgttatccgaaagctgtttttaaaggaaaaattcaaaaatttgatctaaaaaacatagacgaaatcgaaaaggaatatcaaattaaaggaaaactttcgatgaagggaaaatctagagaaattttggtaaatgcactcattaaaaaagtgggtgacggaatccagattgtttccgattttccaattttgatctctgattataatatcgaaattccgaacagaatagccgctaagattgctaaaacggtaaataccgaattaacgggagtaatcaaaagtgatgatccggtatatctaacgctaaaatgactaattaaggcagttgaccagcgcgctttctaaatcggtaaattgaaattcaaatcctgtcttttgtattttttcagaggaaaccctctgtccttttaagacagcctcgctcatttcgcctaaaacaattttaagaataaaggcgggtacttttgggagccagattttatagccgtataagctggcaagcatttttgaaaaactaaggttcgtagtattgtctgtcacacaggcattgtacggacctttgatcatttcatcggtaagggcttttaaataaatttgacataaatcatcaatatgaatccagggaagatattgttttcccgtgcctaaaatggcaccgaagccggctttgaaattgggccccagtttttttagaaaaccttcatttcttcccaaaacaatccccgttctgattttagcagtccgaattcctaaagaagtaattttatctacggactgttcccattcaacacaggttacccctaaaaaatcggttgcagggggctggtcttccttacagataacggaactggtaactgctccgtaaattccaaccgctgaagccgagataaaagcatccggaactttattgtttttctttaagatcgaataaataagatcgatgggttgtacgcgactttctacaatgacttttttacgtcttttagtccatctcttctctacaattccttcacctgctaaatggataatataatcagcctgaagaattgcttcttcgttgatataattcgtttttaagttccatttataataggtgattaatgaggtgttttctcgtgcgctacggctcaaaatcgataccgtaaaaccactgtcagtgagtagatcggtaagttgttttccaacaaatccagtgcctccggttaataaaacattttttgccatgatagtttataatatatttaacagtgcattttgtttaaggcaaagtaaaggtacttaaacattccttacctttaaggcaaattctaaattttaatgaaatggcaactaaaaataaggctatcacaagagaagatatcgtttcaaaatacatggatgaagttttagaaaaggaacaaaaaccaaaatcagtttatcattttgcaaaagaaaatggttttacggaagcggagttttatgctttttttggaacattagaaggtttagaaaaagaaatattcagactgtttttcgcgaatacagttgatttgctgcacaaaaatgcagattatcaggagtatgatatgaaaaacaagatgttgagtttctattatacattttttgagattttaacagccaacagaagttatgtcctgcaatctcttaaaatagacagaaatccacttaaaaatttagtacaactgacttcacttcgcgaggcgtttaaagagtatgtttcggagatattgactgacgactacagactggaacaggaaaaatttcaaaaatttcaggaaaaagctcttcaggaatcggcctggctgcaattaatgatgaccataaaattctggatggaggattcgtcggcagcatttgaaaaaacggatatttttattgaaaaatcagtcaatgcatccttcgaattgatgaatgtagccccaatgaatcatttaattgattttggaaaatttctgtttaaagaaaaaatatacagtaagtaatgaaaacgatcgattatatacctacctcaaaaatagaaagagccagtaaattagtgcaaaccggtgcaaaaatcggagtgaactatattaagcattatgctgagaaaatggtaaactcagatttgacccgtgacaagctgaatgaaaacaatgcggaagatatttacgacggactcaaaagtttgaaaggaagcgcgcttaaagtggctcagatgctgagcatggacaagaactttctgcctcaggcttatgtagagaaattttcattatcgcaattttcagtaccgccgctttcagcaccattggtcctgaaaacctttaaaaccaatttcggaaaaacaccctatgaaatttttgatgagtttaatgccaattctgtcaatgcagccagcattggtcaggtgcatttggcggttaaagacggtgaaaaactagctgttaaaattcagtatccgggagttgccaacagtatctcgtctgatttggctctggtaaaacctattgcaatcagaatgttcaatttgcagggaaaagattctgataaatatttcaaagaagttgaagataaactgattgaagaaactaattatttgttggaacttcaacaaagtcaggaagtggtacaggcctgcagtaaaatcgaaaacatactttttccgaattattatcctgagttttcatcagagaaaatcatcaccatggactggatgagcggtctgcatctttcggagtttaccgctaaaaattcagatcaggaagtgggagacaaattagggcaggcgctttgggatttttatatgtaccaaattcatgttttaagaaaagtgcatgccgatccgcatccgggaaattttttggtgaatgaaaacaatcagttaattgcgctggattttggctgtatgaagcaaattccggatgatttttatgtgccttactttgaattgatcaataaaaatgtaattactgacgagacacttttcaatgagaaattatttgaactggaaatccttcgtcccgatgattcggcttctgagattgcttattttacggaaatgtttcatgatttattgtccctttttacccagccatttcagaaagaaacctttgatttttcagacgagactttctttgacaatatagccaaattaggagagcgttttaccaacgataccaatcttaaaaaaatgaacggaaacagaggttccaagcattttatctatatgaacagaactttcttcggattgtataatctgatgtttgatttgaaagcgaagattgttgtagagaattatatgaagtattaaattgagttttttttgtttcaggtttcaagtttcacgttgcaatagaacctgaaacctgaaacttgaaacctgaaacttgaaacctgaaacctgaaacctgaaacttaaaacttgaaacctgaaacctgaaacctgcaacttgaaacttgaaaccctgaaacctgaaacttaaaacctgcagcttgaaacaaaaaaactatttcaaaatcccttttttataagtttcaatggcgcgatctcttgcaaacgcatgatccaccattggttcgttatagcctaaatcaaattccggaatccatttgcgaatgtagattcctttctcatcaaacttcttttgttgaatttcgggattgaaaactctgaaatagggtgcagcatcacaacccgttccggctgcccactgccagttgcctacattggaagccaattcgaaatccagtaatttttcggcaaagtacgcctcgccccattgccagttgatgagcagatgtttgcataaaaagctggccaccaccatgcgaacccgattgtgcatataccccgtttcgtttagctgacgcattccggcatcgaccatggggtaacccgtagttccggaacaccagcgtttaaaatcgtcttcgttattacgccattgaataccgtcgtaagccgatttgaaattgtgattcacaacatttgggaagctaaataaaatctggatgaagaattctctccaaatcagttcgcttaaaaaggtttggttttttcgattggcccaattaaccagtttgcgaatactaaccgttccaaaacgcaaatgcggtgaaaggtaggaagtactgtcctcagccgggaaatcgcgtgtttctttataattagaaatttgacttaaatccggaggaagtacttttataacgcttttctcaaaaccaatttcagctaattcgggaaaagtaaactgatttttactgaagttctgataaccaattttggtatcaaattcaggagcctgtcctgaaagatggtatttttccagccacttgtttttgtagggtgtataaacggtgtaaggaagttcgtcagcttttgtaatttccttttcttcaaaaataacgtgatctttgaatgaggacgctgtgatatggtgttgtgctaataattgctcaatagcagcatcacgtttgatggcaaaaggctcgtaatctttattaaaaaaaacgtgctgaatgtcaaattcagttataagtgattcccaaaccttacttgtagttccttttttaatcagaatggaggaatcaattgcttttagttgttcgtttattttttgaagtgattcaaaaataaactgaacgcgtgcatcgtttttgggaaggttttccagaatttcatcatcaaaaataaacaacggaattacaggaaaatccgattgcagggcatgaaatagtccggtattgtcttctaaacgcaaatcgcgtcggaaccagaaaaaggaaactttttgttttgtcatggtatgatgttctgctagattttttatctcagctaagagatttatactgatttaagcttttgaattgaatagttcctcgattttattgtagcgataatcaaaaatagttttgagtttgttttttacaataagactgttcatgattctgcccagataccctaatggtaaagcgtagtgcaccacatcaatcattttggttccggttgctgtgggctcgaaaaagtgtttgtgatgccataaagcgtaaggaccaaatcgctgttcgtcgacaaaatagtggttctcctttgaaacagtgatgatcgtcatccagttaattttaatgcccaaaagaggttttaaagtataggtaataatttgtccgggatacatgcgcttattgtcaaaatcctgaatttcgaaactcatattatccagtgttatcgtttggagatttttcggacttgaaaaaaaatcccaacattcttcaacagtagcgtttacatgttgtacggtctctattttgtatactttcataaaatcagttttaattttaactcgttggatgcgattaattttaatacctgctgacctgggggctgtatttctaaaatctatgtgttgtcattttttttgttaatgacactaacgggttagattaatcccaaaaacaatatgtgtcgagcctacggctcttttattacgatgccttttttacgacggattaaaatccgtcgctacaatatgggtcgagccgatggctcttttattatgatatctttttctaggatggattaaaatccatcgctacaatattattcgggccaatggctcgtctgcgacactagagtttcgaaggaacgacaaatattgtaacaacggattttaatccgttgaaaataaagcgtcatgagaataagttccagcggaacgacacattttacacagctttaaatcacaacaacgatcttcgtttcttttttaaatttaattaccatgagtataattcattttaacacatagaaacatagtttcctaatccataaaaaaggcgtttcactttatttaaatacacacaagcttctatgtgaaagaaatatatttctttttttgttctctttttagtaaaaaaatctatgtttctatgtgttaaatcaattttttgttgcggacacctaatgcgttaaattttataatatttaaaaggaacaaacaacattccgaaacattccccgtcttctttgtctaaatgcttgtggtgtattttatgtgcttttcgcaggccaatcaagtatttgtttttggtgtttttaaaccatttaaaacgctgatgaatcaaaacatcgtgaatcaaaaaataacacaccccataaagcgttactccacaggcaataaaaaataagtagttgaatccaccctcaacaccaaagtaaaaaagaaaaatactggggatggcaaacaggacaaagaaaatatcgttgcgttcaaaagtgttttcgtatttgggttgatggtgatctgcatgaaaataccacatcagcccatgcatgatgtacttgtgagtgagccaggtgacacattccatgaataaaaaaatacctaaaaaaattaaaaaagaaatcattttgtatgtcttgaatttacgttttagcttataaaagttaagtttctctatattgggaattgatcttagactaattttaatttataggttacaaaagactgtgctaaaagcccggctttggtataattagaaactctgattctcgaatttccaatttcgtaataaggggtgtttttaagcttctgaagcagttttcggtaataaatataagcagtataaacaccaaatttagcgtcgataggaagttttacaataccctgaaaagcgattctgaaatcttcttcgatttcggcaataatattcgttttagcttcttcgtcaaaggaatttaaatcaattcccggaaagtaatttcggttcaaaaccaaattatcctcttttagatctctcagaaaattaaccttttgaaaggccgatcccaatcgcatggcttcatttttgagttgttcgtatttttgttcgtttccttttacaaaaaccttcagacacattaggccaactacatctgccgaaccataaatgtaatcttcatattcagtatgagtagggtaacttgacttcacaagatcgagtttcatgctttttaaaaaggcctgaatcagatcatcagtaatattgtactgctttacggtatgctgaaaagagttgagaatagggttaaggctgatacctgtttgcatcgctttgtaatattctttctcgaaatcatggatgaggttctctttttcaaagtcatgaaatgaatcgacaatttcgtcagcaaaacgtacaaacccgtaaatgctgtaaatagcatcacgaatacccggtgacaacattttaacggccaatgaaaatgaggtactgtaactctgagtaaccagtttgctgcatttgaaagaaacagtgtcgaatagtgatttcatttgttaagaactaaaagatttttgaattaactcagctgctaattttcctgaaattaaagcaggtggaacaccagggccgggaaccgttaactgtcccgtaaaatataaattacgaacttttttactttttagtttgggccttagaaaagcggtttgcaatagtgtattggccattccgtaagcattgcctttataggcattgtaatcgtcgacaaaatcgttcttacaaaatgatctcttaaatataatgctattttttatttgttgatcggttaattgttcgaatctggagattattttttcaaaatagacttcacgaagttgttcattgtcttgtattccgggggctaacggaatgaggaaaaaaccgctttccattccttccggagcagcagttaaatctgttttagaagggaaattggcataaaacaagggctgttcgggccatttcggatcgtcgtagatgtcggctgcgtgttggttaaaatcaacatcaaaaaacaaagagtggtgtgtgatgttggctatttttttattgaatcccacaaaaaagagaagagaggagggggcaaaagtacggctttcccaatatttttctgaataagcacgatgttcgatatccagtaaagtttcggtatgttgatagtcagcaccgcttaaaataatatccgcttctatggtttttccgtcaattaaaagtcctgtggcttttttgtctttaacaataatcttttcaataggagagttggttgtaatcgttacgcctaattccaatgccagtttttcgattccgcgtaccacatcgtacattccggtttttgggtgccaggttcctaagccaaaatcggcataattcataaaattataaaaagatggggtttttgtaggttttgcacctaaaaacaaaacgggaaactccagtatttggatgagttttggattcttaaactgctttcggatatcggcgctaaccgtactaataaactgattcagtttgaaagctgtttggactgtgattaattccagtgccgaaactccgggacgatagactaaatctttgatggcaatatcataattgcttttggcgtgattgatgaatttttgaagtttctcaccgcttcctgtttcaatctgttcgaaagtgttttttatttcttctaaattgtcataaatgctgatgaaatcatttaaaccaaaatacactctgtaagccggattcagtttgatgagctcgtaatagtcggaagagtttttattgaaatcctgaaaaaagcgttcgaaaacatccggcatccaataccagcttggtcccatgtcgaatgtaaagccttctttcttaaattgtctggctctgcctccaatagtttcatttttctcatagatagttaccgtattaccttgctgtgcgagataacatgaagcggctagagaagaaaagcctgaacctattattgctatagtttttttcatttgtttaacaaatatacaaaaactttaaacaaaaatattacagcatgctgattgtttcttccatagaatcaaaaacgcgtattctttccgataaaattttctgatcgatatgttcgaccatgtttcccataagccaaatctcgttgttcttttgaagcaacttttgtcccatcgatttgacatattggttgattacgttgcgatctggttgaacagtcatgaaagatacaaaagtaatgttctcgaaatgtttggttaaatcctggaggttttcgataggcatgctttcgcccagataaatggttttgtatccttttagtaaaatctcgtactgcaaataaagtaagcctattttatggatttcattcaaaggaagagaaagtacaaaaattcgatcggttttcgtgggtcttagaatttgcaggctttctgtataaattaatattttctgcttaatcaaatgactcataaaatgctcatttgcgggagttatggtttcggattgccataataaacctaattcttttagtaaaggaagaaaattgtctttgaaaacttctctaaatgatttttcagaaataagccagtcgaaagtattgaagaagatttcctgatcaaaattcatcatcgccatcttgaaggaagtaatggcgtaattttgggagttttttttggagatgatttcgcgaactaattgtggaattttttcttcgggataggtcgctattttagatattttatagccgtattcgtgtaataatgtgatgtttaaaagcttttgaagattctgtagattataaagcctgatattggtatcggtacgcatgggctctaagatattgtatcttttttcccagatgcgaatggtatgtgcttttattccggataagttttcaagatcttttatgctgaaaaccgtttttatattgtttatcatttttcgctaattggtgaacaaaaatagaataaaatctcaaattacctttataacttggttgaaatccacaggttaagagagatttacagattgataatgatttaatttgtctaaatgaaggatcgttttagaaccatctttacttctgttatacatcgtttcaaatttggcgccgtaaattacttcatcaaaagtataagaagttcttgcagctacagtattgctgtacatatcgtcgaaagtggtaataaaaaccagtatttcgccatgtacttttttaaaatcttcttctgtaaaattatacaacggactgctttctgtaatgggatgtaccagtgtccagcttaaagaaagagcgtttatgcgttccagttcaaggtctagattatagaatttattggttttttgaccattttcttctaaacttaatcccagagtcattctggcagtagcatcggtgaaattggtgtttttaaaaggaacaaggcgtaccatgagtcctctcttgtcttggtaaggtgaaattaatgcatgatcggcaaactttaaaaaagcggttggtttgctaaatcttccaaagaaaagaccggttgctatggcaaagctcagcaatccaatcaaagcttcggcagcagaaagagcacttgttaaaaatccggtagggctgatatgtccgtatcctacagtggtaaaagtttgagcgctaaaaaagtacgcctgtccgaactgaatcagtataccttctgattgcttaattccgttaagattttcaattccgataacatagtaagcaagtgcaaaaataaaattgataccgatataaaacgaaaaaaggataagcatgaatttccagttgggcatatcgatcatggtgtggtaccagctaatgcgacgaaggatatgcattcctcttttttcgacattaggtgttccgtttttgtttacaaaacggcttccgtagctgtttgcatttgatccgaaaccggaattaatatcgggttgagctttctggtttattttcttgagaagcgccattgcagattggatttaacaacaaatgtaaaaatatctgtgagatgaggaaatgggctgtaaagaaaaagcaatctgtaaatagaaatactacagattgcttttgtttttattgcgataagattttaactctatttgcaaaaagttgatttgtttttgatagcgctttgactgcctaattctattgcttttgtaaaatctttgcaggcatttttctgatctccgattttgttataagccaagcctctcaggttgtaagcgatataatcttttggatttaaacccagagatgaggtgcagtctgcaacggtttctttaaaattcgttaacttgtagtttacgtttgctcttccggtaaaggcgtcggcattcatgctgtccaggtcaatggttttgctaaaatcagcaagggcgcctttaaggtcgttgagttttagtttggcaacaccgcgattttgataggcctctacaaattttgaattcatgctgatggcttttgtataatcggcaatcgctccttttgtattgccggcttcagcttttttaagggctttgtcaaaatagccggttgcagattgtgcccaggtagagcaggtgatcataacaaatgatactaatagaaattttttcataaaccaatttgggattagttagtaggttaataatttaggaaacgaatttaaggaagttttgttttgtaagagaagtgcttttgtcaaatatttattattttttttgcgaagagaaggatcagtattttattctggtttcttcttgcttaaaaaggggctcgtgtttaatctccagatggcgccaatctggaaatttccagaagacaagctaatgttgtttttgttattgtcggagaaagcagagaatgttgaattgttgagataggacaggccgagtgaccatctttctttgttatagcctaaggcaattctgggaaaaaatgtggggtaaatttcgatcttttgttttccgaaatcatttattctttcggtgccaacatttgcacctatggttactgatccgctggtaaaccatcttttactaatggcccaggtgtacgcataacctccgctaattccaaattgaaaattgcgcagtgaatttttagatttgtgtacaaaagagctatcagagcctattttcgaaaaataaactcctccgccaagcaggaagcttccggctgattttaattgtctttcgttttgaacaaaggcagctttataggagaattttttgttgttaaaaacatattgtccaaaagcgccatattgctggattttgagatcagggtataattgtatgtttttgtcagcatcatccgccgtatagaaaccgtggtatttttgaatgaaaagatcaattatgaattttcttccgtagttatgaatctgaaaatcgagtgctttggttcttcctttttctttgtctttcaggaaacttagtccgtaaccgtaactaaaatcgattatggtattttttacagaaacaccaaaacctaagctcatgggggtattgggcatgaatcttttcatatctccttctgtttcctgttgcagtgaaatgaatttcatcgataaataggttcttacggaagctttattttcaaaaggtttgatataagttgtgtcagtctgtgcagtgcagaaatacggtaaaacaaaaataagcagcagcgaaaaataaaatttcattagattctcgaaaagtagatgattaaggttgtgctttgtttaatttgttttggtcgtgttgatccgtttatagttcaaaggtatttaaaacattcgatcttctgttaagttttctgacttcaaatctggatttattgatttcaaggttgtaatagggagtgactttaaaggattgtaaattttgggatttagtttgccacaatagagtctgctgttttaaggtaaggcttagaaataaaaaaggtcaagtaaatgaatacttgaccttttgtgacccgactggggctcgaacccaggaccccatcattaaaagtgatgtgctctaccgactgagctatcgagtcattgctttcaagaaacttgtattgtgaatcacagtttgtgacccgactggggctcgaacccaggaccccatcattaaaagtgatgtgctctaccaactgagctatcgagtcatattcgtttcttgaacgcgggtgcaaatataagaagttattttggatatatcctaccttctttgaagtaaaatttaataaagaattaatgatctgataaagaggttgtaagagaagaaaggtaaatgctttttgacgtgtttttctttttactaacgataatgacgtataatttaaacgattttttggagaggataaaaggtttttaatcagtggctaatatgaagttttgttcttttgtaagggaataaatcttaaaattcaaataaaactaatactgcgtttttatttgattgttacaggacttccgccgtttaattaaacaattttatactttttaaggtaatagtatagagtgttgtctttaaatcagatgtaaaaccaatttctttatgtaagagagaaatggaaatacgtgatatgaaaaagcctgcaaaatatctattttgcaggcttttagtttttgatgagagggcagtttaattcgtttaacctgttttaggaacctcagccgtaaagctttatttgtttaatcttgagatccagtttacataatctaatcctttaacttcgatacctttagttaagctgccggaattgatatcataggtgtaaacaaaatttccgtttgctttagatgatactaaaatataagctttgccattttcaaccagaacaggtgaagcacttacatattggcttaaaggtaaatttaattttgttttagttttggaaactacgtcaacaacataatactcaaatacgtccgaagcgttgtaatcatcaaaagttaaaagaacctcttttttccctaaacgagttatcccttttccgtttcctaaatcgtaaagaccgtagaattctttgttcccattgctgctggttgataaatcaaaaaagtaatcggcattaatttctgttgagccgttgcttactttgaaaatagcacttggtttatcagcaactgatccccagcgatcaccacaatcagtaataatgtaaaggtcattattgtattttattgtacctcccattaaagtagaaaatgtacctaaagcaccggaacggttgtccgtgtcaatttttaaattgctcatagaagggtaatctacagaagccaggtaggctacagaagtactggtccatccagaatggtatactgtataaggcaaatatagtttgccattgtttaaaacacatcctgaaaggtaaatagctttatctgtagcctgtaatcctgtaactgttaaagttcctgattttgctaccgataaatcatctgtattaacaatgttgtatgtaagatcagcatttggtgcagatgttgttccgttccatacaataagggtgttgtcatttaaccagtatgaccataaagcgttaccggctaatgttatttcttttgacaaagtcaataagtttttttcaaatttgtatttagaaagttttccgctggctattttatagtaaaatccatttttgaataatcttccgtttccggttatttctgcaccatttccattagcagatgtaaaaccggtggctaatgttcctgctgtaagcatataatttgccgatggattatttacgcctcctgaaaaaacaaattcttctccggttgtagttgcatcagtttcttttttgtcatcattgctacaagaagaaaaacctatcaatgcaatgcttaatagacctagaaattttaatttagtattcattattagttgtttaagttaatttttatttgatttattatttaatgaaatatcttagctttatatagaaacctcttccggctttttgtaacttgtaattatcataggcttctgtgtcaaaaatgtttgtacagtctaatgctatattataagttccgttttttaaggaatagcttatgcttgcattctgaataaactgggttgggattctgcttttgccagcttcgaaagctttgcttggccatgttagataaaaccagtgaatatattgagagtaccagtcaaattgaattttggtgtcttttcctagccagttttcttttccatatcccagacttccgttggcaaaaagccaaggttgatttggtagtctgtctaaataggcagaagaggctttgtctttatttgtagaattattataacttgcgttaaatgaagcgttaaaggttttgtaattgtattttatatcagtatcaatacctgtgatatctactttgccgacattgttgtaattagagaaaatgcctccgggtagtaaaagaataaaatcctgagcctttcttataaagccatttgcttcaattgcaatagagtggttgtcctgtaatatgaatttatagtaagctccaagattaaaattatcgctgctttcaggttttaatttgggatttgccagtatgtttataccgtcacctaataattcttcaacttccggaatcctgtacgtgtgttcgaaagaagccttaataccactgttgtcattgaatttgtatctcaaagcagtcccatatccaaaataattattggtaagttctgattcttcttttttgtaacctgtagaattataaaataccgcttctcggatataggtatgcaatcgataattttttacaaatacagaggtgcttaatcgattattaaaggcctgattttcccaacccaatcctgcaattgatttgtttaatttgttaggcacgtctaaggcattcgattcctgattgtttaaattataatgatttattccttttcgggtactgttgcttaaattgtaattgaagctgaatagattattatcattcaatttatagccaaagtttgcccggacaattgcaaatttattctcgtacttaaatatttgaaatgatccctgctctccaaaatttggatgagtgtcaattacttcgccattccagtcatacttattgatggaggtatcgatatttgtgcttttgtcaattgcataagaggcatacaaattagcgcttaacccattgattaaaaaatggtcttttctgtattttatgcttggcagaataaaatcgcctgaggaatgtacttttccaaaaacaatttcctgatcagcaccagtctgacgttctttatagcggttggcatattgaaatccgataaggaaaatatctgcccattttttatttctaaaaccagtttcaacctgtaccatagtggattcaaaaccatcattaaatcttctgaagttgcgaggagtgctttctccagatagagtgatatttttcatgatgtaattgttatccgaaaaattgtaaaagccatttacgccaattgtaaatccgcttttcgtgctggtgtatctgcttgataaagcggttctgtgggtgttaaatgatccgtagctgtaacttgcatccagaaaagtatttatattttggttggtgacaatatttaccgcacctcctaaagcatctgctcccagagaaaccgggactacacctttgtagacttcgatacgttcggctaagtttattggtatattgtttaaagacatggtgcttccgaagttttccatcggaatcccgtcaataaaaaacttgatttgtttgccggataatccgtttacagaaaagttgaaatcacctcctaaaccacttgtttctctgattcgaattcctgaagtacgatttagaacctgatttaaatctgcagatgtattgtagagtttcttaagttcaatagcgttcatgttaaaagcttgttcgcgtgcacgttcttccttcgattttccggttactttgacctcatctaaagaagcggtgtcttcttcaataattacatcggtaagctttttgtttgattcgtctatgttgatcttaatttgtttggatttaaaacctacatagcttatttgtagtacataatttcctgactccgcagtaatttcgtattgaccgtattcatttgttaatgcagaataaggtgttccttttaatactaccgaaacaccttcggcaggtttaccattatttgctaaaacgacaccgcttaatactaccttgcctttttgtgcgaaaccctgaattgaacaaatcatgatcaacaacaaggttgcaattctttttatctgcattagtttgaattatttggaattagattttgacgcaaaattaatcccaacaattgtgtttagcaaattatttttaattattctaaataaaaaaaagaataactaaaaaataggtgttttgttttgaaaaattaagtaaatcttaagatataattaattttaaattaaaaaaatcttaaaattcgaaatgagtccagagagtattgagttttataaattgtattttgtttacttatttatacattacctcgccattattgctgaattgcaataatagtaatagcgataataatgttatttaagtttttcatttcagataattgaatcgcaaatgtattaattattttgagaagatttcaataactttttttagtttttgtaaaaaactgaaaacagagactgaaaactactttttaaccggagggtattgtgccataattttagatacaaactcggcaaccttttcgtcttttttagcaacgtttttggttagcgttccaacaccttctccttgccagatcatttcttttttcttagcatcaatcaaatcaatgaataaagttccttcagtagaagtagaaacggtagtttggtttcctccgtacatcatgtaaggattccatccccaaccccaaccgtaaccccagccagcactaaattgatttacattgacttgttctcttgctttagtaaaaatattaactaataaatcagggttttcgcttttggtaaaacctttggcctgcatttgatcatcgatggcacgtagaatacgtcttttatccaaatcagatatttcaaccttgtcaattccgggcttgaagaaagcataagttttgtaagaggcaaaatttacgtttttgtcgtaatcagagtaaacgctgactgtgctgcatgatgctagtattaaaagcaaaaaaacgggtactaatttgaatgttttcatatgttaaaaatttaatgttctctttgatctgcctgactgagcgtcgcccgtcaaactgagcgccgctcggtcagactaagcgtagtccgtcagactgagcgcagtcgaagtcccccccctttttttcgtcagcttttcaactccgctgcgcttgacattacgatctaaaatagattttcatctaccctattaggtaaagtcacttttaataaaggctgaacttccattgctcttttgatagcaaaaatagcctcgtcatttctggcccagcttcttcttgaaattccgttgttaacatcccaaaaaagcattgaggctaaacgttttgaagcctctttagatccatcaagaaccataccaaaaccaccgtttataacctctccccagccaactccgccgccattatgtatagaaacccaggttgctcctctaaagctgtctccaatcacgttttggatggccatatcggctgtaaagcgtgatccgtcgtagatgttagaggtttctctgtacggagaatctgttcccgaaacatcatgatgatcgcgtcctaaaacaaccgttccaatttcacctttggcaatagcctgattgaaagcctcggcaattttaattcggccttcggcatcggcatataaaattctggcttgcgaacccacaaccagtttgttctcttgtgcgcctttgatccatttgatattgtcctgcatttgctgctggatttcatttggagctgtttgggccatttcttctaaaacctgactggcgatagcatctgttttctgtaaatcttccggttttcctgaagtacaaacccatctaaacggaccaaaaccgtaatcaaaacacataggtcccatgatgtcctgaacataacttgggtatctaaaatcaatattattttcagccataacatcagcacctgcgcgtgaagcttctaataaaaaggcatttccgtaatcaaaaaagtaagtcccttttgcagtgtgttggttaatcgctttcgcctgacgacgtaatgattcctgtactttttctttgaacaattcaggattattagccatcatttcgttagcttcttcaaaagaaattccaactggatagtaacctcctgcccaaggattgtgaagagaagtctggtccgaacccaaatcaattttgatgttttctttgtcgaaacattcccaaacgtctactacatttcctaagtaagcaatggataccacttctttattggcttttgctgtaaggactctttttaccagttcatctgtcgaagttacgatttcatttatccagccctgctcgtgacgaatcttggtgatttttggatttacttctgcacaaaccgtgatacagccggcaatatttccggcttttggctgtgcgcccgacattccgccaagccctgaagttacaaaaagatttccttccggattttgtttgatttttctaaaaccgttcaaaaccgtaatcgttgttccgtgtacaattccttgtggccctatgtacatataacttcccgcagtcatttgtccgtattgcgaaacacctaaggcattcattttttcccaatcatccggtttcgaataatttgggataaccattccgtttgttacgacaactcttggagcttctgcatgcgaaggaaacaatcccatcggatgacctgagtacatggtcaaggtttgctcgtctgtcatttcagacaggtattgcatcgtgagtaaatattgcgcccagttttgaaaaacagctccatttccaccataagtaatcagttcatgtgggtgttgtgctacagcataatccaaattgttctgaatcatgtgcatgatggcttttgcctgcaatgattttccaggatattcgtcaattggtcgggcatacattctgtactccgggcgaaaacggtacatgtaaatacgtccgtaagtttctaattcttctgaaaactcctgaattaattctgcatgatgtttggcatcaaaataacgcagggcattttttaaagccagctttttttcttctgctgataggatttcttttcgctttggcgcatggttaatcgctaaatcgtatgttgcctttggaggtaatatggtaggtattccttgttgtatttgttctttgaaagtcatttttttaggtactaagttgctaagattctaagctgctaaggttttgatctaagcaggcaataatctgcgatttattaaataggctataaactccatcggagcgacatggcaattaaagaaatagaataattatctaatttgcaaattgtcacattttctaattaaaaaataactaaggataacggatatccgacctgtgataggatttgtggatagtaatcctaaattttcgaaacagaatatccataaatagatttttagattttaggttgttgattttagatttgtccttcgatttcgctcaggacgacgacgtgtaaaattagttagttttaaaatttaagaaattctctaattgttaaattgccacattctctaattcgttttttttctaatttcgcctgttcgtttgtcaaacccatacggacaatgacgacagccgcttttacagcaataaccacgttttagatggtgtttttcagtaaagcatttataaccttcgggggtatagtaaaaatcttccccttcgattaatttattttcattactttgctccttcataaatctgcattgcgttcgtgttcctcattttttaaaatcaaaaataattaatagattgtgattttaatgaaatcggacaaatttcatctacaaatttataaattttacggctaatgtttctgattgttgctaaatatttaattccaaaagggtatcggggaatggctgtgtttccgtttgtgattttaaaatatgatgcagataaagaaaatgctgttttcgtcaatcatgaaaaaattcacctgagacagcaattggaattattagttcttccgttttatattttttatgttttagaatatgcaattcggctgatacaatataaaaacaaagagctggcctatcggaatataagttttgaaagagaagcttacgccaatgaaactcaccttaattatttgaaaagccgatctttttttggttttttgaattacttaactttaaaacattattagattttgaatcaggaaatccaaatcgcttttccaaagggcattacgctgactataaaacgggaagatttaattcatccctttgtttccgggaataaattcaggaaactgaaatacaatttgcttcaggcgaaagctgaaaataaaaagactctgctgacttttggcggtgctttttccaatcatattgcagcggttgcttatgccggaaaagagcagggttttagaacaattggcgtgattagaggtgacgagctttttgataaaatagaagagaatccaacgctaaaatttgctcaggaaaacggaatgcagtttgaatttgtgacgcgggaggagtatcggcttaaaaatgaaaatgccttcatcgaaaagttaaaagataagtttggcgatttctatttagtgcctgagggcggaaccaatgaatgggcagtaaaaggctgtgaagagattttgaccgaagaagatgccatttttgatttcgtttgttgtgcggtaggaacgggtggcacgatagcgggattgattaatagtgcgctaccgcatcagaaaattttaggatttccggcattaaaaggtgactttttaaccgatgaaatttgtatttttgcaaagaaagataactgggatttaatttctgactatcattttggaggttatgggaaggtaaatttggaattaattgaatttatcaatactttttttgaagaaactaaagtgcctttggatccaatttatacgggaaagatggtttttggcgttatagacttaatacataaaaactattttcctgaacattcaagaatattattgatccataccggcggattgcagggaattgcggggatgaatattaaattgaagcagaaaaaattaccaatacttaaaagcaatggttaaaaaaatattagcacttttaatgctggcaactgtagtaggctgctcttcaagtaaacctactatcgcgacgaccaaaaaagcggcggcagtccagaggtccagagtggcaacaaccaaaaagccaacttataccaaaccaattggcaaaaaacacccttctacaaacaatacaactgaggttattcagtctacttcaaaaacagttgtcaccagcgatttaatcaataattatattttacagtacaaagatattgcaataggcaatatgcagaagtatggtattcctgcaagtatcattctggcacagggaatcttagaatccggtgcaggaaaaggagatttggccctggaagccaataatcattttggaattaaatgtcataaagactggttgggagaaagtgtgcgtcatgatgatgattcagctcaggaatgtttcaggaaatatgcagaagctgcagaatcgtatagagatcatgctttatttttggttgggaaaaatagatatgcgactctatttacttacgaaaaagacgattataaatcctgggcaaaaggattaagagctgcaggttatgctacagatcccaactatccggataaattaattagctatattgaacgatacaatttgcatcaatacgattgtcaggttaccggaaaaagctataaaccttttgaaaaatcagctccggtaagaagttcttctgtttcttctaccgctccttcctcttctaattcaaatgatccaaatctgtatgaagtgcagaaaggagataccttgtattcgatttcaaaaaaattcaatgtattggttgacgatttaaaacaaaaaaataatctttcggataacgcgatttcgatcggacagaagttgagagtgaaataattatcaattatcaattgttaattattaattttctagaaagttgtttatgaaaaagaaagtcaaaattggaatttttacttttgctataattttaagcacgaggcttttttgtggggtctatgatcatgatgaatttgcagaaagtcatttttttataaaacaccgcccaatctggaaatggaatttttactcgccaattggaatgtctgataaaaaaaatgaggaacttactgatgaggaacaaatcgaacaaaaatattttaatacgtttattagagatcaaggcttaagccgataaataaatgtaactagagaaatctaaaatttaaaatctaaaatatttataaaagaagtagtcagctttttgctgaagcagaaaaagtaattccgggtggagtaaattcgccggtaagagcatttaaagcggttggtggaactccaatttttgtaaagagtgccaaaggtgcttatttgtatgacgaagatggaaataaattaatcgattatatcaattcatgggggccaatggttttaggacatgcctaccaaccggttgtgcatgcggtaattgaaaaagcaaaactgggaacttcatttggtatgccaacggaattagaaacggagattgctgctttagcggtttctatggttccgaatattgataaaataagatttgtaaattcaggtacagaggcttgtatgagtgccattcgtctggctagaggatttacaaaaagagataaaatcgtaaaatttgcaggctgttatcacggacattctgattcatttttgattcaggccggaagtggtgccgtgacattcggatcaccaaacagccccggagttacggaaggaactgcaaaagatactttattggcaaaatacaatgatttagagaatgtaaaaactttaatcgaagcgaataaaggcgaaatcgctgccattattatcgaagctgttgccggaaatatgggttgtatcccgcctcaaaaaggttttctggaaggcttaagagaattgtgtaccgcaaacggaattttactgatttttgatgaggtaatgacaggcttccgtctggctcgtggtggggttcaggaattgtacaacatcaatgccgatattgtgactttcggaaaagtaattggcggaggtctgccagtaggtgcttttgcagcccgcgaagaaatcatgaattatctggcgccgcttggtccggtatatcaggcaggaacattatccggtaatccgctggcaatggctgcaggtttagcaatgttacaggcactaaataatgatccggcaatctttactcgtttagaagaaaaaacagcgtatttagaagctggaatcgacagggttttaaaagccaataatgttgtttttaccatcaatagagtagggtcgatgatttctgttcactttgatgcaaatccggttgttgattttcaaactgctgcgaaaggcgataatgaaacgtttaagaaattctttcacggcttgttacaagaaggtgtttatattgccccatcggcttatgaaacctggtttattaccgatgcactaacttatgaagacctggattttacaatcaatgcaatcgataaagtttcgaagactttttaaatcttagaaattaaagtatatatttttttttcaattgaaggctcagtttttttagtaaagctgggtctttttttcattgtagttttcattttagttttcagtcgcagttttcagtcgcagttttcagtcgcagtttacactatccagtctcatttttacaatttaaattctaaaatcagtaagtagttaatgaaaagttaataaatgggttttccgtcgtatattcaggataaaaattatttttgtttattaaataaccattaaacctgcagtaaatgaagaaatttctcattttaactacaatagcggcatttgtgctatttcccacttctcaatttgcacaatcaaataagaaaaaatctaaaaaagacgaatcggcagctgcctcgccggagaaaaaaccggagtcagcaattaaagactatagtaaagtaatcaccaaagacgctatctcagatgacggactttttaaagtgcacaaagtcgataaaaaatactattttgagattccgaataaatacctgaacaaagacatgcttttagtaagccgattgtcaaaactgccttctaatttgggtggcggttatgtgaatgcaggatcggaaactaatgagcaattaattgtttggcagcgttttcaggataaaattctgatcaaatcaaaatcatacaatgcggtagccaatgatagtttaccgattagtatttcggtaaaatcaaataactatgaacctactttatttgcatttgatattgtagcttttagtaaagattcggccaacactgttgtggatgttaccaaattttacagtactgatgttaaggctatcagcggaatatcggcagaaatgcgtgaaatgtataaagtaaaagggcttgatgattcgagaagttttattaataccatcaagagttttccgatgaatatcgaggtcattcaggatatgacctataatgcttcaaagccatcgatgctggaagatacagaatcgattagtattcagatgaaccagtcgatgattttattgcctgaagtgccaatgaagcctaggctagcagatccaagagttggttggtttaccgtaagtcagtacgattatggaagtaatgaattaaaatcagatcttaaaacctatattcgtcgttggagattggaaccaaaagatccggaagcctatgcaagaggagagctagttgaaccggtaaaacctatcgtttactatttggatcctgcgactcccgaaaaactgcgcaagtatatcaaacaaggaatagaagaatggcaaaagccttttgaaacagcaggatttaagaatgcaattatcgcaaaagatgctccgacaaaagaagaagatcctgattttagtccggaagatgttcgatattctgttgttcgttatgttgcaagtaccacgcggaatgcagttggtccgagtgtttcagatccaagaagcggtgaaataatcgaaagcgatgtgatttggtatcacaatcatttacgttcctacagaaaccgatatttactagaaaccggagcagcaaacccatcagccagaactttacaaaccggcgacgaagaaatgggagagatgatgcgtatggtaatcgctcacgaagtgggtcatgctttaggttttccgcataatatgggcgcaagctgtgcctatgacgtagaaagttaccgaaatggtgattttacccaacaaaacggaatttctgccagtataatggactatgcgagatacaattatatcgcgcagccgggagataaaaatattcgttttattcgtaaaatgggggcttacgatcactatgctttaaactggggatacagagtgattccaaatgcaaaatctcctcaggacgaaaaagcaactctggacaaatggattttggacaaagccggaaatcctttgtataaatttggaaaacaaagtagtgcttttgaccctacttcgcaaaccgaagatattggaaataattcaatgaaagcaagtacttatggacttaaaaatctggaatatgttgctgcgcatttaaatgaatggaccagtaacgtgaccaataattatgaagatctggacgaattgtataaagaaatgttagatgtttggagccgatatgtaggtcatgtggtgacgaatgttggcggagtttatgaaaatactaaaaatccaaatcaggcaggaagtgtttatgaggtagtaccgaaagcgaaacaaattgaggcaatgaactggcttcaaaccaatgcttttgcatcaccaacatggatcgtaaatgtaacaactttaaagaatacggattttgcaggttatgcagagaaattcagaagcttacaggtgagacagctaaatagtttgcttagtattggacgtatcggcagattggttgataatgaaattcttggagcagacacttacaaagcactggatttattaagagatacacgaaaaggaatctggaaagaggccgcaacaccaggaaatgttacgatttatagaagaaacctgcaacgcggctatatggatcgaatgggagccttaatgacagaagaaatcaagccatctgacagatcaacggtgtattataatgtgggacaatctgatgtcagagccctggttcgaggagaattgaatgcattaagaagtatacttttggcagcaaaagcaagacctgtaaatgcagaaaccaaataccattacgaggattgtattaagagaattgacttaattcttaatccgaaataagaacttataaaaaaagaggcttaaaagcctctttttttatgaatgatactagttatttccttttttgtattctctcgctttctcttttgctttttcttttttttcgttctgtaaagcggtccattttttgtattggtcctcattcagtatcgatttcattttggcatcgttagctgttttttcatccattatttgttttttaaaagcagccttttcttctgttgttggctttgtaccactgtcttttctgtttttacggtcttctctaaatttttcagcgttagcacttctgtcagccagaagctgttttatctgagtttgctgattggcatctaaatttagttcagaagtaagtttctttaactgtctgtcattgcgttgttccggagttagtcgctctctttgtggttgaacagactgatccgcttcttgtgcaaaactcgttattccaacgaataagaaagctgcaataattaattttttcatgaggtacgttttttaattgtttatagcatttagactttagcggatgaaagaggtttaacgagattgtcgtaattatagtttatttaacaaaactagccgtgaaaaaggtttacggcttggtctttagtgttttaataatggttttgtcagtctatgttttttatcatgtttttataagaaaaggttaattaaatttgttttcataatagaaagaagagacacttatcatcaaaatcaaaaaatggaagaattatttagcaaaaaaaataaaaaccgggttttaaaagcggtaaacggagagatgtcctatcagaagttaactgcagcagaattacatcagtttgtccaaaactggaattatgatgatggaatcgaaccttttgagtggattgtcaaacaaaaaacacttgataagggaacagttgtttgtttgtattggctgctgcagcctgattatttttgcaggtttaaaagtgaagatgaggcaagagaagatttgtattttgagcaatataaattgttgaaagaaattgaggaaagatatgttaacggtttttatcaggacgagaatttttcctttgatcccaaagaaagttttgtggatgaaaattccaatctcgaaggtattccgtctgaaatgttgactaagacaaaaggaatagctttcgaacgacaggatattgaatttgcttttttaagaaatccgaacgaaaaagagctgaaaacgatcgccagccgtatagcagatgctataaagattattcagctttcaaatccggactttgtttatgacgatacagatagggcagtaaacgccattgttgaaagtgtcgaatattggaaaaacaatgaaccagggaaggtcaaaattaaaaatttgtcttatttatggatggattgtatgcataaaaagcacaattgggagtggattgtctgggattgggaaaccggaaataatctgggcgtcaccaatagtacaaaagagttgacctgtttggcagatacgattatcaatcataccatagacggatttcaacctgcttcgatcatttctgatttgtacaaagagatgaagggagtaaataatttttatgatctaaagagagatccttacagcggaatcggattattgtttagcaccgatcatttgaagtttagaggataacaagcaggaaggatttttttgctaaaaaagagagacgaagagatcgtttggtttttcaaagggtaacattttacacgtatgggattaagaaaaattacagttgaagagaatgtttattggtacaaaagcgttactaagtatgcacttgatacagaagcggcaacatttgaaataacgatattcctggaaggtcataaacaaactccattgaaaatcagttttgttacatgggaagatttgtatgctggaaaccctttaaatactggagtagtgttagccagagtatctgataaagaaaccgaaagcgtcaatttaaaccggccaaaatatatcagagaatgcattttatacggattgaaaaaggcatggaatggtggcaataaagttgcagtgatggatggtttggagatccttaaaagtttaggttatgatgtttcctgtctttgcccaaaagacggattggttgttgcacatggaaaagaatatttaaagtaagttgatttttcaggatcagaagttacttcagaagaattgtttaatttagtagaacaggaagttaaaaatctcaaaaaatagtaatcaagatgagtttaaaggatacagtaaatacaaataaaatagcttttttttcaacgcagccttacgataaaaccttctttaataaatacaatgattcgtttggttttgaattggatttctttgaaacacaattaaatcctcaaacggctgcattgattgaaaaagcattgattgtttgtgtttttgtgaatgatattgtcaatgaagcagtattgaaacaattggctgaaaaaggagtgaagattattgccttgcgttgtgcgggttttaataatgttgatttggatgctgctaaaaagtacaatttaaaagtttgccgcgttccagcttattcgcctcaggctgttgcggagcatgcaatggcaatgattttaacgttgaacagaaaaacacataaagcttacaatagagttagggaacaaaatttttcactaaatggtttattaggattcgatttgtttgggaagactgtcggaatcattggaacagggaatattggaaaagcttttgcaaagattgcgataggatttggctgtaaagttctggcatatgatatcgtgacaagcacagaaatggaaaaagacggcgttcggtttgtttcgttggaagaaatctttacgtccagtgatataatctccttacactgtcctttaaacgatcagacgaaacatattgttaacaaggagtctattattttaatgaaagacagcgtgatgatcatcaataccagccgtggagctttgattgaaacagcggctgttatcgaaggtttgaaagaaggtaaaataggctatttaggaattgatgtttacgaacaggaggagaaattgttctttagggatctttcggctgatattattcaggacgatgcgattcagcgtttaatgagttttccaaatgtattggtgacggcacatcaggccttttttacgaatgaggctttaacgcagatcgccttggtgacttttaacaatatcaagtctttactggatcagaatgatattgaaaataaagcagctttgttagtttaaatggaatcacaaacccgacagtttttttaaacctgtcgggtataaaaacagaatcgtaaaaattaaaaaaagagaaaatatgaaaagaaaaattttaatggcatttgtaattttaggaatgatttcgtgtcagaataaagaaaaaacagaaaaagaaaatgttgtggaggccattgcaactgacaccataacaaaaacagcaaccggaacagcagctgtgagtgaggctcctgtaaaagacgataaaacggtagagttaatcagaaagcagcttctggtattgctgaagaaagatttgccagcactgacaaaagaggataggtttttttattatgatgcatttgatttaaataatgatcagaaagaggagtattttgtaggtttctctaattcctatttttgtggaagtggtggctgctcaggatatattttaaataatgacggaagtctgattaattcttttacggtaactgattttccaatttatgtaaccacttcagtatctgaaaaattctataatctaatagcagtaagtggagggaaatttcatcttctaaaactgaaaaacggaaaatatccgtcaaatccatctgttcaggaagttgtcaaagaggaggcttcaagagaaagtgcaaaggttttagatattgatggaaagaagttggagaagtactcgttttaaaaagcaaacgcgacaggttttaggaaacctgtcgcgtttacttttttcaaaaacgtattttatttttttaagattttaggcaacgttttgggattttggcgattgtcccaaaaggccattacaattaattctttaggagttaatttatagaaaatattatagtgtcctaatgttgaggtgtgtatgtcaggaaaatttgttttaacgtagatttcaggattgagaattaaaaactgaactctttgtgcaatttcagcaattaactttttagggtaaacagatgatttatttcttttagtccagtaaatcaatatttttcttctctgtaaaacagcagttttagtctagactactttgacagccattctaaatcttctttgtctaaatcctcctgagaagtaactcttccatattttatgtcttcctcactttcattaagaacgtctatcccatattgctctaattgatacgttttagaaatgtcggtattttttaaaaggcttctgattttttcaagtaaagtgatatcctcaatgtttttgagtctgtcaaatatttctaattttagttccagtgttcccatcgtcattagttttgaatatcaaagttatacaaaatatactaaaaaaaacccgacaggttttcaaacctgtcgggtttaaatattaaaatagtaagggggtattttagaattataaaaccctaaaattgacttttttataaaactatcctaccaattccacaaatttaaactccccctcaacagcgactttagtcaaaccgtgtttagataagtttttcatggatgcatcccattttttaccgcttaaattagcagtaatttttagttgctgaagatccattttgttttcatttcctttcaataaatcaacgataaatttctcttcgtctgataattcgacagtctgttttttctccgggcgcatttgcgggaataataaaacttcctgaattgatgcattattggttaaatacataatcaaacgatccattccaatacccattcctgatgttggaggcataccatattctaaagctcttaagaaatcctcgtcgatgataccgtttgcttcatcatcaccttttgcagccagacgcatttggtcttcaaaacgctctctttgatcaattgggtcgtttaattcagaataagcattcgcaatttctttaccacaaaccattagttcaaaacgttcggttaagtctggattatcgcggtgttctttgcatagcggagacatttcttttgggtaatccgtaatgaaagtaggctgaatgtaatttccttcacattttgcaccaaagatttcatcgattagttttcctttccccattgttttgtcaacttcgattcccattccttttgcagcttcaaaaagctcttcttctgtttttcctgagatgtcaaacccggtaaaatgtttgatcgaatccgtcatcgtaacacgggcgtaaggcgctttaaagttgattttatgctcaccaaaagtaacttcgcttgttccgtttacggcaatcgcacaatgttccagcaggccttctgcaaattccatcatccagttgtagtctttgtaggctacatatatttccattgcagtaaactcagggttatgtgttctgtccattccttcattacggaagtttcgggaaaactcataaacaccttcaaatccaccaacaattaatctttttaaatacaattcgtttgcaatacgcatgtaaagtggaatatcaagcgaattatggtgcgtgataaaaggtcttgccgaagcaccgccgggaatcgattgtaaaaccggtgtgtcaacctcaagatatccggcatcgttaaaataaccacgcatagcggtaaacaacttggtacgtttgataaacgtttctttaacatgctgattcaccgttagatctacataacgcattctgtaacgcaattcagcatcattaaaagcatcgtgtacatttccgtcctcatcaacttttggtaaaggcaacggacgtaatgttttactcaaaaaagtaaacccgctcacacgaatacatttcgctccaacctgagtcgtgaacaattctccttcgataccaataaagtctcctaaatcggttaattttttaaaaacctgattgtataacgttttatcgtcaccttcgcacaaaacatcgcgattcacgtacaattgaatacgcccttcactatcctgcaattcagcaaaacaagcttttccctgatctctcacactcatcaaacgtcccgcaacgatcaccttcttaccttcctcaaaagattcctttatctgctttgaagtatgatttacaggaaaaagattagccggataaggattgattcctaagttgcgtaagttttgaagtttttctcttcggatgatttcttgttctgataatgccattttgtgctcttttttaagtgtgcaaagataaagaaaagaatgtagatttcagaatgctgattttagattttttgaagcagtaattttcaggttttcaaggtagttttgtcccgctatccacttgtatcttttctaagattctaagattatgaggttctgagaatctaagaatccaacaaaacgattaaacgattaaacaaatcaccaattaaacaattaacgaaacttcgtatctttgagaaaaaattaaccacaatgaaattatataagttactcagtttttcttttttatttgccactctggcaagctgtacttttaccgaaaatatttatgtaagtgataacggaaccggaaaattttctttagatatggacggttcttctttaatggcgatggcaggagatcagattggtaatcaattgggagcgaataacaaaaaaaatatggattctacttttaccttcaaacagctattggcggataaagaggaaagcatttcaaaattatctccggaagttcagagtgaaataaaaaaattggaagatcttgtggtgaatatcaaagtgaatgaggagaaaaaagaatttctgatgacattttcggaagactttaaaaaagtaaatgacttacatgatatattacaatcggtgaatacacttcaaaagctggttggcggagcagatgcttcaacaccctttgtaggaggtttgggagacaacaacagtaaagtaagttttaattacgacggaaagaaatttacccgtaaagcgacagtcgacaaacaaaaacaagcagagaaagtgaaagatacgacagccgaaatgtcaaaaatggtttttgcatcttctacttatgttttaaaataccatttcccaaaacgcattaaaaaagtatcaaatccgaccgctttgtttagtgaagaccgaaaaacagttacaattcaataccctttcacggattatatggagaatcctgacaaacttaactttgatgttgagtttgaaaaataattaagatgaataaaaaaatccaacttcaggatttaggaagcagagactataaatcgacctgggaatatcaggaagaattgttcaaagatatagtcgacctaaaaatcagaaacagaagagaagagcttgatttagaaacacccaactacttgttgtttgtagagcatccacacgtgtacacattaggaaaaagcggtgatttcgagaacttactcttgaacgaaaaacaattggaggccaaaggagctaccttctataaaatcaatcgtggtggtgatatcacctatcatgggccgggacagattgtgggctaccccattttagatctggagaatttctttaccgatattcataagtatttacgttttctcgaagaatcgattatcctcactttagaagaatacggtttaaagtccggacgaagtgacggtgaaacaggagtctggctggacgttggaactccgtttgccagaaaaatttgtgcgcttggtgttcgtgcgtcacgctgggtaaccatgcatggatttgctttaaatgtaaatgtcgatttgggttactttgataacattatcccatgcggaatccgtggtaaaggagttacttccttacaggtagaactgggtgtagaaaaagttgatgaagcagaagtaaaagcgaaaatcatcaaacatttaacccatttgtttgaagcggactttgtttaaaaaaaaagagcttttgaaatataaaatagtatgatacatgctgaagaaaataacaattatagaattgcggttccttcagcatttgatactgttttttcacatttttattttgcagagaataaaggcaatattcctgtaacggaaacactattgcctacttttcagaccattctagtttttatttttggagaaggtgtttctttaaaatcacaacaaaatacaactcttgaagcacagaaatgtcttgttttaggaccaataaaacaagcttttgaatacactttaaatcctgattcggagattttagttgccaattttaaagaagatgcattttatagattttttggacatgcgcttcttactcattctttacctgttgatcctgatactttgattgccgaaaattgttttgcccttttatgggaagaacttaaggaactctctaatccaaacgaacgtgttgatcatattttagaattttgcaaaccttatttgcgggaacaacatgtcatgacttctcttttaaccgattttagagaaaaaaacatagatccgataaaagcagtcgcctctgaaacaaatcagtcacagcgaaatgttcagttgaatcaaaagaagttttttggctataccatcaaagaaattaatcggtacgagcgttttttaaaagcagtagaggtaattcaaaaggatattttaaaaaatgcaaaaacagactggcttgctgttgtagagcaatgcggttattacgatcagagtcagttgatacatgattttaaatattatatgaatatctcgccaaccaaatttctgaaatttcaaagcgatatctgtagctcaaagaagatttagaagtctgcttttcgttttcttacaattgtgatcagatcctcggatttacatttgtcatgttcaatcttaaaaaacagaaaacatgaaaaatttaatcgtttacgcacatccaaacacaggaagtttaaatcactttttcaaacaaattattgcggaaagacttgaggaatccgggcaggaatttgtcgtgagagatttaaacgcaatcaattttaatccggttttatctttggcggatatgactggacagagagtaggggaaattgccggagaggttaaaatcgaacaggattttatcgcatgggctgaccgcattgtttttatatacccaatttggtggacaggaatgcccgcgattatgaaaggttatattgaccgtgtttttagttatggatttgcttatcgatacgatcagggaattcagaaaggtttattgacagggaaaaaggcaatcataatcaattcgcacgggaaatcaaatgcagaatacgaatcaataggaatggataaagctttagcactaacgtcagatatcggaatttttaattattgcggactagacgttcagaagcatttttattttgataaagcagacagagcttctgacgagaatgtttcaggatggagcaatcagattaaagacgtgtttcaggaaaaggttttgcaggtataatttgttatatttctgttttatagtggtttaaggcaattttttggaattgttgaagttatttataaaaccacttttttctaaaacttaaccaattatgcaaaatgtaataacagacctgtcgcgatttatgcaatttaatgaagcggaaagtatggcctttaaaaacatactaagactaaagaaaatcaaaaaaaatgagcatcttttagtcgaaggagaggtttgtaatttcggagtttttattgccgaaggttgtattcgctattattactcgctggatggagtagaatctaccggaaacttcttctttgaaaatgactggtattctgattttgagagttttctttacggaaaaccttcattgctcaatatagaagctttggaagattgtgtgttgtatctggcgtacaaacatgattttgaaaaactggttgctgaatatcctgtattcaattcctttttgcgaattatgatggaaagaaccataaaaggtctaacgggtagaaatatggcaatgtctttattgtcgcatgaagaacgctatttacgttttttaaagtactgtcccaaagtggtggagagggtttcgttaaaatacattgccagttatctgggaatccaacctgaaagtttaagccgaattagaaccagaattacattgaacagtaaatcttaactcaagtcaatttttaagaaaattcggctctttatttttgcttctataactgtaaagcaaaataaatatgaaaagaatattcttgattattataagcctttttgggtggatcacctatgctcagacgggtaccgtaaaaggaaaaataattgacaaacaatctgaaaaaccaattatcggagttgctatagtattaattggcgatgagaaaaaaaatgccatttcagatgctgagggtaattttaaattaaccaatattccggttggccgacagagtttgagttttagttttgagggttatgaaaatacttctgtttctgacctggatgttactacaggaaaagacaatctgctgacggtttcgatgatggagaagtttaatacactggatgaaattgtggtgacttcgggtttaagtaaagccaaacccattaataaaatggcgttggtatcgactaaacaatttacgacagaagaggtcaatcgatatgccggaggaaggagcgacgtggcacgtttggtttctaattttgcgggagtttctaccggagatgacagccgaaacgatattgtggtacgtggaaattcaccatcgggaatgttgtggagaatagaaggaatgccggttccgagtcccaatcatttttcgacactgggaacgacaggaggcccaatttcagctctgaatccaaatcttttagctaattctgactttttaacctctgcttttccagcggaatacggaaatgcaattggaggtgtttttgatctgagtttccgaaaaggaaatcccgatgattatgagtatatgattagtgccggagcttatccgggtgtcgaatttatggccgaaggtccgcttggtaaaaaaggaggttcctttgtagcgtcagccagatatgggtttgtcggggttttaggtttagcgggcacagatgcacagcctaattacagagacattagttttaatgtagatttaggaaaaagtaaaatgggtaatttctcgctttttggaatctacggaacatcggatattgattttttaggagataaaatagataaggaagatccttttgctgcgcaggatgaggatgcctatgttaaatcggggtttgcttcttttggattaaaacacaatttagagattggaacaaaatcatatttgaaaacaattgtcggtttttcaaattcgagcaactcttatgagaatttccgctattataatttcaatacgcccgcagtaaatcgtttgccttttacggatattagtaacaatgaaaatagagttactttttcgactttgttcaattccaaaattaataagaagaccactttcagagcaggtttactttttgagaattatacgctcgatgctaaaatggctacccgtgacagacagcaggacaataacggagatagttatccggactttgtacagctcataaacaataacgggaattataatattattcagccttttgctcagggacaatttcgtttgaccgaaaaactaacctttaatgcggggatacacggacagtatttttcgataaacaaagagtttgctttcgaacccagagctgctttggcttatgcggtaaatcaaaggaataccattagttttggttatggattgcatcatcaaagtgttgcggctccaatattatttctgaatgaatgggtaaatggaaatcagattcagactaacaagaatctcgatttagttcaaagtcagcattatgttttgggttatgatgtacgattggccagaaagtggagagggaaagtagaaatttactatcaggatattagtaaggcaggagttcagtcctttccaagcagttattctactttaacagaaggggctgattttggttattcaattgataaaacgtctttagtaagtaaaggaagcggatacaatcaggggattgaatttacagttgaaaaattctttagtgaaggctattatgctttgtttactacttcgctttttgaaagtaagtacaaaggaagtgatggtatagagcggaattcaccttttaataatgggtatgttgtcaatctgttaggagggaaagaatttagaatagggaaggctaagaaaaatgttttttcgattgatactaaatttacaactgcgggaggacgttattatactccggttgatttggctgcttctaagaatgccggttatgaaatcagagacgatgccaatgcattcagcaaacagtatgatccttatttaaggttggatgtgaagtttggaatcaaatttaacagtaaaaggaaaaagaggtttcatcagttttatatcgattttcagaatgtaaccaaccataccaatatctttaccaaggaatataatcgtttaacgaatagtgttaatcagaaagatcagattggtttttctcccgattttggatataaatttcagttttaaaatcattaagagtttagtgaacagaacaaatgcagacaaaagatacgtctattgtctgcattttttatatttaagattcattttggatttaagcggaaatctgtcggggattatacttttacaatttctaccctgcggttttttgctttattttcttcacttgtattgtcaacaattggtttgtcagagccccagccttttgtttgtagccttgaggcatttattcctttagaggttagtgaagcttttacggcatttgctctttgttcagaaagttttttattgtgggctgcgtcgccattattgtctgtatgaccttcaatagtgattttaagattagaattagccgttaacaatttctggatttcatcaattataggtacagattctgtttttatagtagccttgtcagtatcgaaattaatatacaaagcgatgtgccctttagtatcaagttctttttttatggcatccgctttgataagagaggcggtcatcttaaaaggttttgtctccaaaaccatccatcctgccgaaacggcatcgtcatacggagtaagctgaatccagatatttctgtctgcacgtcgaatcaaataggtagtggtaatggcatttgccatgaaaccgtaaccattcatatattttacacgattgttgtctggaattgtatgtgaagaatctgcaggaactttcatttcagagatttttactccgtctacacttttaatcaattcatctaaatttcgagctacttcgagatcgctataagattttccttcttttgctttaattctggaatagaaaatttttccttccggtttttcaaaatgatcttttacccaaaaataagcaacgtcataatcagcaatagtgttcttggaagtgtcttcgtaattttcaggtagattaaaataagggaatgtgccaagtgttttgtctgaaattggtacagaattgaaatcaaattttttagccgacgaagattctgaagtggtttcggtagcagggggcgttacaagagaatctgtggtatctgtcacatcattctgctttttattggaattacatgctacgatcatacatgcaattagaagtaatgttaaaattttgattttcatgtggttagtttttagagaatcaaagataacaaagcaaagagattttaacaaagaaaaagattcaatttaatcaattttttttgaatgtaatgttttgaaaaagtgatagttattattatttggattctgtgttttgtgacggattatttgccttacgttttatataaaaacaattggtctgttgctattttattttttagaaaagctccaattgagtaggaagcagcttaaaggacattcgatggtatttggttgtaccatattttttaatggcttcgcggtgttcagttgttggataacctttgttctttttccaattatacattggaaactcttcatgaattttatccatatattcatcacgataagttttagcaagaaccgaagctgctgcaatacttaaaaatttcgcatctccttttatgatactttggttagggattgattttagtaattcgatttcagctgtagaaaattgttttcccacagtattcctaagtcctagttttgcattcagagatcggtttccgtcaacaataataaattcaggtaggggtgttaactttaaaacacattcctgcattcccttcatcgaagcattcaggatgtttatttcgtcaatttcatcaggtagtaaatgtgtaaccgcaaaactgatggcctgctcttctataataggttttaataagaatcgtgctttttcagacaattgtttactgtcgtttaaaatttggttttcaaaattggcaggcagaattacggctgctgcagttaccgggccagccagacatcctcggcctgcttcatcagttccggtttctaaaaggtatcctgagaagtttttttgaagcattttctgggtttttatattcaaggtcacaaatattgtaattttttttaagagtgctaaaaaaacttttttcaatgatagcttggatttacggaaaagaaaataaaagattcaatttttaaagggttcgtaaaaggggccgtcgttttttaagaggcttgctttttcgcgggttcaagtgttaaaaccgtgttaagtgttaaatttacataaatctatgtttttagcataaattaaagaatattgctattaaaaagaatggaatctaaataaattgtgatagatcttagtagatgtttaggaatttaggctaaaaataagttaaaaaattttggtgttttaagaaataattaagatgtttgcgccatactaattcaaaataaattaaaatgaaattaaaatttaaatggatttttacgctggttgtggcgttgtctatgcagttttcttttgctcaggagagaactgttactggaaaagtctctgataaaacaggggtaattccgggagtaaatgttcttgtgaaaggatctaaagtaagtactcaaactgattttgacggaagttattccattaaagcaaagacaggtgatgttttagtttattcatatgttggtatgaataacaaacaagtaactgttggttcttcaaattcagttaatgtggtattggagtcagaggctcaattaatgaatgaggttgtagttgtaggttacggtgtacagaaaagaaaagaagtaaccggttctatctctaaaattgccggaagcgacatttctaatcttgtaactccgagtgttgaaggacttttggcaggtagagcgacgggagttcaggtattaaacaataccggacttattggtgctgcgccaaaaattagaattagaggtatcggatctatttctggtagtacagagccattaattgttgttgatggtattccaatttattctggtgatatcggaggggtttcttctacaaatggtttagcagatatcaatccggatgatatagaatcttttgatattttaaaagatggtgctgcaactgctatctatggatcaagagcagcaaatggagttgttttgattacaactaaaagcggaaagaaagggactcttaaagtttcttattcaagtgtttttggtgttgctagtgctgctaaaaaatatgatttgttagagactcctgattttctggttatttctaatgaaaaaagaaccaatagaggtcaggctccttgggcagttggaaatacttacaatacagattggcaaggtgctgtgttaagaaatgcacctcaaatgacgcataatcttaattttagtggaggttctgataaaacaaagtactatttatctttaggacttactgatttagacggtatcaatttatctaatagtatgaaaaagtattcgattagagctaatattgatcaggatgttaacagatggtttagttttggtacaaattttaatgtaaacagaacggagtataaaggattgaatagtgctgcaagcagtttatcaggtaacttttttaatacgatcagacagttgccaaatacgcctatttatgatgctcttgatccaacaggatacaatctttcgtcaaataatgcaaccgttggacagtgggataatttagctccggtaggagataatattaccaatattatttatgcattggatcataataaatatgaatcaacaacaacgagaataattgcaagtgtttttgcaaatgcaaagattacttctgatttaagctataaattgcaggtaagtgcagataatgcatcaacagatggttaccgatactggaatcctgtgcacggagacggacgttcatcaaatggtagtgtatatcaagacaatacaaatcttatgagatggaactggcagaatattttgaactacaagcacacttttgctgaagatcataatcttggagtaacaggtgttgctgaatatcaaaaatccaaaactaagattttttgggggtcaggaagtgatattataagtgatttctttgataaaaatttagtaagtaatacttataatacaagagattctggtggtggtgttactgaaaaaggtattatgtcttatttaggtcgtgttacttataactacaaagaaaaatattttattcagggatcccttagacgtgacggaatttctcagtttgaaaaagatgttaggtaccataatttccctggagtttctgcaggttggaccgtttctaaagaaagtttcatggaaggaattagcaatacagtttctgatttgaaatttagaggttcttattctcaggttggtaatgttgaggttttggatggagcttcttatccttcaaaagatcttacaattggttctccttatggttcttctaatggtattggttactggcaatttgggaatcctttattagaatgggaaacttcaactaaagttgattttggtgtagatttaggattacttaacaatcgtttgacattaagcttcgattattttaaaaataatatcgacaatttagttttggctgcaccacaacctccatccattggtattcctaataatacggtaaatcaaaatgttggtaaaatgtacaatcagggatatgagtttgctgctacatttaaggcaattaataatgcaaactttaaatgggatatctcttctaatttaacgcttgctaagaataaagttacggcattgtatcaaggacaaccaatcataggggggtcatctacagatacaagcattgctccaaatatcattattcagcaaggagaatcagttaactctttatatggatttaaatactggggagttaataaagcaaacggtaacccggtgtattacaaagcagacggtagtttagtacaaggaaacttgccagctgttacctattctgtttttgatccaaataacccggcagcggcaggtgcaccagcatcattgactagttctgatagaactattttagggaatacgttgccaacttattacggatctgttagttctacgatgaagtataaaaatcttgattttggttttatgttcagatttagtggagggaataaaatttttaattccactagaagagagttgatgaaccaaaactttaacaacaacggaacagaaattttaggaagatggcaaagtgttgacaatccgggagacggatggacaccaagattatatgcaggtacaaatacttcaacaaatcttagtggaagcgcaagtactcgttttgttgaaaaaggcgattttatttcacttgataatattagtattggttacacattgcctaaaatgttgctagataaaattaaagtagataacttcagactatttgttcaagcgcaaaatatttggctgatttcagattacaaaggtttaaatcctgaaatggaaacatctggagtagatattaatggaacgccacgttcaaaagtgatctcagttggattaaatgtaagtttataataagtacatatgaaaaatataataaaaacaattttactttctgttgctgtactcgggatgagttcatgtacagaagacaagatattggatttaaaaccagtaaataatattctgagccctgatgcttttacaacaccaactttgatagagagttatatgaacggtgtttacaatgcggcagctattggtcaatataacgctactactgcaaatggtggtagaggatatgtttggggagctgcgtatgtagagcaaggagaagcaagaggtgaagatgttgttaatatggcaacattttatgatttgacatacagtacaacctatgatccaactagtgctaacaatgtttattactgggttgatggttacagattaatcaacagatgtaatttgatgattgaaggtacaacagatgctgttgccaaaggtgtcatcaccaaagcgattggcgataattatatcggtcagtgtaaatttttaagagcaattacacatttagaattactaacttattttgcgaaaccttattttgacactcctggtgcaactcatgcgggtattccttacagagaagttggagttaatacacaagctgaaattgactcagaaacagtaaaacctagaaatacagttgctgattgttatgcaaaaattctaactgatttaaacgctgcagaaactttaattactacaggtagttcaagcgcatttgcatcaagagttgttggtaaagcttctaaatgggcagcaattgcattcaaaacgagattgtatcttcaaaaaagagactgggcaaatgtaattgttgaagggaataagttaaccggagcttttgcattgacagctgatccttacgcaccgtttcagaatactaccgctcttaatactagtaactcagagtctattttctctattcaacatgctgctacatctaatcctggtgtaaatgctgcattagccagtatgttaagagacagagcactggtttgtattagtcctattttatggagagatactaaatggtggttgacagatgataaacgaagagaagatgggaagtttatttttactgcagctgggattaaatacactaataaatatacagatgttacaaatcgtacagatgctgcaccagttatcagatatgctgaggtagtgttgaatatggctgaagctcaggcacgtttatcaaacttaccaggagctctaactttgttgaactctgtaagaaacagatcgttggctaatcctgtagcaactccggggaaccctgtggcgcaggcttatacagctgcttcttttactactgttcctactatggttgaggctattctaaaagaaagaagaattgaatttttacaggaaggtcgtagatggactgacattcacagattgacggcagatccaatagcatctgttgcaactaacggaattcctgctaaggtagctagtgctgtctcacctcctgctactgcatttgttttgggtaatagttttgtgattacaactccggttgccgctatacctgcatctgactttagatttttatggccaataccacaaattgaaatgaatactaatccgggattaggtcaaaatccaggatggaattaagataaatattttgattttttttgaaagcccccgatcatttttttgattgggggtttttgttttaataatttggtttgaaaaagaattcagatcacaatgatttgtttttttatacgtttttatcttttacctttgcttgataaattttatacaaataattacctataaaacaatcaaatgagaatattcatttttctatatcttttagttgtaccaactttattattttctcaggaaaaaactacttctaaaaatagtttagacatgaacacaaaatattcaagtataacggatacggtaaaaaagaaaaaagccaagattgctactatagatcaatatcagattatcacattagaacacgataccacctatgttgacacctcgctgactttgaagagtgcttataaacaaaatcaccttagaaaagacgacttcggacttttggctttctccaatattggacaaacatttaatacattacaatacagtctgaccagtttctctccttatcctgaaattggttttagtggtaaacattttaattatatgcaggccgatcagattaattattattcggcggctactcctttgacagaattgttctttaatactaccattaacaaaggacaaaacgtagactcctttattaccttaaacacctcaaaaaatcttaatttttcgattgcttataaaggcttgcgttcagaaggagattatatcaatcagctggtaagtgctgggaattttaggtttacaacgagttatgctacaacggataaaagatatgccataaatgcacactatacctatcaggatatttctaatgaagagaatggtgggattacgacacccacagattttgaaagtgataacaaagattataaaaaccgtcagcgattacaagtgtatcttacagatgccaagtcctttttaaaaggaagacgcctgttttttgatcatgctttcagagtaaatcccaagaacggaagcaacaatttatatgtaacacatcagtttaattacgaaaataaactttttgaatataatcaggcaacactagcttcaaatattggtaatggaacggcgtttcaacgctttggagattcatatgttacaagtggtatcaacgataaaacgaaatacgaaaggctctacaataaggcaggacttgcttacgaaaactctcttttaggaaaatttaatttttttgtagacgattaccgctccaattatgagtacggtagaattatcatagggaaagacaaaaaagttataccggataatttatttgtacaaattaacaatttcggaggtcagtacgaataccaaaaaaataaatggaacggtcgttttctgtattcaagatcgattacaaatcagtcgctttctaacttagatgcgaaactgagatacgatatgaatgataaaattcagtttgatttcagatatcgtaacatcaataaattgccaaacaacaatttcaatttataccaaagcagttacacagagtacaactggtcgaataattttaaaaatgaaaaaattaattcgcttagcgccaatgtgtcaaccccttggttaaatgcagaagttcagtataccgttttaaacgatcatctttattttagagataaatcttctgctgctcaggctgctgcacatattcaaattattgagccggctcaatatgggaatgcgattaattatttggaaattaaagcaagccgtgagtttaaatttgggcgatttgccttagataacacccttttataccaaaaggttggtcagtcagatttgattcttaatgtacctgattttgtgaccagaaataccttctattattcagggcatttttttaagaaagcattgtacatgcaatcaggagttgtattcaattattttacaaaatattacgggaatgactataatccggttgtaggagagttttttgttcagaatgataaaaagattggcggttatccgttattcgatctttttctaaacgccagaattcgtcagacccgattttattttaaagcagaacacataaacgctttattctcaaaaagcgattattattcagcacctaataatccctatcgtgattttgtaatccgatttggtttggtttggaatttcttccaataaaattaggcgcctcatagattaaaaaccaaatattaaaattcaaatagaaatggacttttcaaaaaacattttagaaacaataggtaatacaccattggtaaaactcaacaaaattgttgctgaaatagatgcactggtattggcaaaagtcgaaacatttaatcccggaaattctgttaaagacagaatggctgtgaaaatgattgaagatgcagaagcagatggccgattgaaaccgggaggaactattattgaagggacttcaggaaatacaggaatgggattagcacttgtagccatcattaaaggttataaactgatctgtgtaatgtctgacaaacagtcgaaagaaaaaatggatatcttacgtgcagtaggggctaaggtggtagtttgtcctaccgatgttgagcctaccgatccacgttcttactactcagtttcaaaacgtctggctagtgaaacgccaaattcatggtatgtaaatcaatacgataacatgtctaatgcattggcacattatgagcaaaccggaccggaaatctggaaacagacagagggaaagattactcattttgtagtgggagtaggaactgggggaactatttcgggagttgggaaatatttaaaagaacaaaatccaaatattaagatctggggaattgatacctatggctctgtttttaaaaaataccatgaaaccggaattttcgacgagaatgaaatctattcttatatcacagaaggaatcggggaagatattttacctaaaaatgttgacttctctttaattgacggattcaccaaagtaacagacaaagatgcggcagtttacaccagaaaaatagctttagaagaagcaatttttgttgggaattcagcaggagcctgtataaaagggttgttacagttaaaagagcatttcaagccggatgacgttgtagtagtgttatttcatgactcaggaagccgttatgtaggtaagatgtttaatgacgactggatgcgcgaacgcggtttcctggaagaaaatgtaacaaaagcagaagacgttattaaagatcatatcgataaacaattaattgtcgttcgtaccgaagaattagtttctcatgccatcgaacgtatgcgtaagtataaaatttcgcaaattccggtggtagatattaatggatttgttggatctgttgacgaaacggatttattcagaagttacgttgccgataaaaacgttgccgaaaaaccgattaaagaagtaatgggtaaaccttttccaatcgtaaaattaggaactccaattgaagaagtttctaagttgttcacaaaagaaaatgatgccgttttagtagatcttgaaaacggtagtcatcatattattacaaaatatgatatcattgggtcaataaaataagatcctttttacacatttttaaatccatacatctagttttaagtaattagatgtatggattttttgtataaatgtaaatcaggttaggttttgtagtatggattttaagtagatgaaaaaataatttttgtaagaatattagtaaaatttattaatttaggactgtgtaatcattgtatatgcctgaattatgaaagaagattttcttcattacctctggagattcaaaaagtttgaaactctagatcttagaactactcagaatgaaccgctcatcattattaaaacgggtgattatctggaactttccgggccggatttctttaatgctcaaattaaaataggagatcaaaaatgggcaggtaatatcgaaatacatctcaagtcttcagattggtatgtacacgctcacgaaaaagataccgcttatgacaatgtaattctgcatgtggtatgggaacacgatacagagatttttagaaagaataataccgagattccggttctggttttaaaagagtatacttctaaagaaatactcactaattatcacgcacttgtagcgccaaaatcatggatattctgcgaaaaaagcatcactgaaattgaggagtttgtttttaaaaactggcaggaaggactattctttgagcgtttagagcgtaaggcaatatttatttatgatttgttaaaggagaatcagcaggactgggaagcggttttattctcgttatttgcgaggaattttggattgaataccaatggaatttcttttctgcaaatggcaaaatcccttccgttttcaattgttagaaaggaaagctttgaagttgaaaatctcgaagcgttgttttttggcaccattggattgctggactctgagaaagaagatgtgtatttcaccgacttaaaaatgaggtattattatctgttgaacaaataccagttaaaaaggcatcctatagatccaattcagttttataagcatcgcccggataattttccaaccattcgactctcacaacttgctaatttatatcaaaaacaaaacctgttttcaaaaataattgctgtaaaatcagttgaggaagtacgtaagctgttaatagtatcggcaagtacgtattggcagaaccattatcagtttgataaagaaagttcaaagaaaccaaaggctttgtctcacgcatttatagatttactcattataaatacgattctcccgcttcagtttgcctatgcggctacaagagatgaatcaatttctgaggagttaatttcttttatgaatcaggtagcaccagagagcaatgcgattattagtaaatttgagtcctttggagtaaaagctaaaaatgcttttgaaactcaggcgcttttagaacttaaaaaagaatattgcaatcagaaagcctgcttaagatgtgcattaggaatagaattgcttaagaataattagataattagacaattagataattagacaattagataattagatactgtgatagtttttattgtaggggaatgttcacttcaaaaatctacaatctgtaattagaaaatgagacaatgtgataattttgtacttttgtagaaagagacaaattaaaaatctagaatctgaaatctataatctaaaatcaataaaatgtcggctattttaaaacttaaattcttttttgaaaaatatggttttcacgtatcttcaagattagcggataaacttggtatgcgcgtgacaagtgtgagattgttttttatttacatttcatttgttaccgccgggcttggattcggaatttaccttactttggctttttggattcgtttaaaagatctgattcgtgccaaacgaacttcggtatttgatttataaaaaaaagctccaaattttatttggagctttttttagttttttattcttcgatttcgttattgttaagtcttgatcttttcttactgtatccgaaataaaccaaaataccgatagctaaccatcctagtgaaagaaattgagcatcgtggcttaaattgatcattaaataggtgttgattgcaatacctaaaacggcaataattggtagtgcaggaaccttgaaagttctcgttaatccaggttgttttactcttaaaatccaaaccgcgatacaaaccattgtaaaggcaaataaagttccaaaactggtcatatcagctaatttgttgattggtgtaaaagcagcaactgtagcaataataccacctaaaattattaagttagttttaggagttcctgaaagtggatttactttagagaatacagcaggaattaatccatctttagacataccaaggaaaattctggattgtcccataatcattaccattaatacagaaacaagacctattgttgcagcaattgtaataataaaaccagcccatccctgtccggcaatatcaaatgcataggcaacaggagctttaatagcatcaggatattttcctagtggattaaaatctttgtagttcatcattcctgttagtactaaagaaacaagaatatataaggtagtacaaattaataaggaagcaatgatcgcaaacggaacatcttttttagggtttaccgcttcacctgcctgagtcgaaacagcatcgaaacctacataagcaaagaaaatagcagcagcaccggaaacaattcctccaataccgtaagcattgtgcgtagtttctttttctataatttgagtagctgccggaataaacggactccagtttgcagtattgataaagaaaagaccggcgataattacaaatattacagctgaaactttaagaataacaatgaaattgtttgcttttgcagcactttttgttcctttaataagtatggaaataaccaaaatgacaattaaaaaagccggaagattcatagaaaaaccttctccggtgtaactggcagggtctgtggtcagccattcaggcaaatggatatgaaacattttgagcagtttattaaaatatccggaccaggaaacggcgaccgtcatcgatcccatcgcatattcgagaataagtccccaaccgataatccaggcgaaaatttctccaattgttccatatgcgtaggcataagcagaaccttcaacaggcaaaatagaggcaaactcagaataacaaagagctgcgaaaacacaggcaatccctgcaatgatgaaggaaacagctaaggccggaccagcgtggtaataggctccggtacctgtaagtacaaaaattcctcctccaataatggcaccaacaccaatggcggtaaggctccattttcctaaaactctttttaaatcactttttttcatatcggcctcaaaggctgatataggtttaactctccaaattgacatatattatattggtttatttgttactaagctccaaatgtatcgttttttgtaaaaaataaaaacaattatctcatttttagttgtaaaatattaaatattttgataaaacctccgtttatcaatctttccgggctgagattcattagattaatgaggtaaaaccttagaaacttagcatctcagaaccttagaatctcagattattagacatttcagctaattaaatcattgagaataatagagtctcagaaacttagaatctcagattattagacatttcagctaattaaatcattgagaataatagagtctcagaaacttagagtcttagaatctcagaaacttagaaacttaggaccttaggaccttagaatctcagattattagacatttcagctaattaaatcattgagaataatagagtctcagaaacttagaaactcagtatcttagagtcttagaatctcagaaacttagaaactcagaatctcagaatctcagaaactcagaatcttagaatcttagaaacttagaatcttagaaacttagaatctcagaaacttagaaactcagtacctcagaatcttagaatctcataaaaaaaaaagcgttcgtaaaacccgaacgctttttttatgaactgtctgctccctattacttaagatacgattctaacaaaggacaattgtatttttgaaaagcagccgtttttctataaaccgaatagaaattaatcagctcctgccctgctttaaacgggttcttttcttcttcctccgttgaaacaatattggcgtagtgattgtaatacttgcattcaaaaatcattaaacttgccagggctttttcatttgtatttttagacattttcaaggctttctcgtaatacattttggccatggataaattatagtaattgcctttttgatatttcttttcattttctgaattatctccatacacataatccacatacgattcacccgaagtccaatcgtacgcagtcatcatccaggaattccccaaatacgacacattaaaataagcatgtgccagtttcagattgcttgtcgctgtattttgtttttttagctgaatcaactgcgcaataaaatcggctttattaaaacgatagtcgaactttcgttctgtatctctttgcagaattttgggcgtaaacggattctcgtttaaaaagtctttatacgcataatttttctcccaaaaatctttcggcatactggcaaaagtttggtaagccagctccaaattattatttcggaatgcaatcgttcctttcaaatctttataataattgacatttggcgctattgttcctgaacagatatacctttcgaaaggcgttttgtcttttttttcctgaagtgctatcaaacgatctatatctgcctcggttgcattattccggtcaaagtaaccaatataactgtaaaaataaggcgcattgtaggcggagtattctccttcatttttaatatctgatttcatcgccagcaaacctgctgtcacgcgatcgccttttgcagcaaaatctttgctggcgattcgatacaaactgtataaattcttaaacaaacctaaatcggtttccaccaaattttcaaccgaatcaaaatatttaaaaagctgattttgaacctcgttatttttcaaatcgtcctgctttaaagaaaccaatgctaactgaatattcttttgcatttgtatcgaagaattggccttttctgaaatcatatccgtgtatttctttcccaggtcaatttcgtctcctataaaacaaagctgtgcaatcgctgctgtgatatagtccttttgctcgcctgaagtctgctctctgatggaaatcaaataatattctaattcccttaaatacaaaatatcattcctgaaattctcctcctttgctttggcataattttcataccagacggtactgtcaaaaaccaccgaaggagttctgtcattggtgtattggggtgtaaaaatccaatcttcaagtttgttcacttccctcccgatcaaaaaactcaaatacaagctgttcggactcaactcgtaaacctcctgaatgtttttcaaacctggtgccggattgcgcaagccttcaatggccagaatcacactgcgctcttcatcgttttgagccaatgccaaagtctctgctgttaatttccagttgtaatgctgcaaaaccgcaaatgatttctcttcgcaggaaacaaatactttactcagtaaataattctgcaaagctaaatcctcaacacataaagctttataatacaaagcccaggggcttaagatcgtgtttttatcagctgcaaaataagtatcgtacaaacgaatcacttcattcttatcagaggcataaaaactgtacctcaacagtaaaaaggcataacgctgtttcaaaaaagaatcttttgccgttttgattttcttttcgaaatcactaacatcggctattttatgatctttactgtcataaccaatattaccccacgactcccatttcacatcaggattactgttgtactctaattttttcgcaaacaaaatataattgagaagcgccttattctttgaaagcaataaggcttcaataaaagtgttcttatcaaaaacttttttcagcgatttcgtttcgtaagcggtttcaaatttctcagcatccgtttcgtacaaaataacatgtacgtcttttggatcgacctgactgcccagttttttcttccactctgtacaattcaattcctgatctgctcccgaaacagtatgggtatcgtagtaattatcggccgaataataaaaaggtgtcagcttaaaaaatccttccctttgtgctttaaacaaagccagtctgctggtctcaggcgaaacactccacccacaagccaaagagacctgaacactaaaaacaaaaagtaaagagctaaaaacgcgcataataaccggatatattttgggttccataatcgttgatgtattttttatcgaaagagaaaaacgtcactttggtctgactgtcgattggaattttactttttacgatcgaaatcattttgtcaagttcgtcttcagaaattttctcaatcctgatttcgtccccgtttctcaaataagtctgtcccactaaaatatcgtcttgcagtatatatttagcgtctgatactttttttaatttaacggtatcgttttgaatcctgtcataatcggataaaattcccttaaactgattgcctctgaaaacaactgcccaactgtacaatggcagagcaatatcaagctttaaaccgtattggttgtgtgtaatatattgtgccaattcttcgctggttcctatggaatttttggtagtaaaatcttccggtttactcaaattgtaacacatcagcaagcctttatctacaggtggaattcctgcttttgaagcatatttgtattgccagagtcttatggtagccgaaactgcagtcgcaggatagtttttcttgatttgctttaacaagtaaaaataattgtcttttgatttttccgaccagtcacaatcaatcaggatttctttaaaatcaactttcaattttgccatttcactcgattttaccgaatcataattcaactgtttacgattctcctgcttgtaataatcttttggatacacaatcgaactggctattttctcggcttttgagtcattccttttcattcctatctgttcaatacgtttggcaattctcacagccaaactgtccagttgcttttttccggatttcaaaaccacttcattggtaataaaaatactgggggtaatttcaggattgctttcatttaatctgatatcgtgaagggtggcaaccggcaaaggttctttagcatacggattccagtctacatcaaaaaaacgaatgtacaaatgttttactttcaagtcttttatcaacgaatcatctgtgttttcgaaattcaaatcggttttccaataacaaaacgatcgaaccacttcatgttccttctcacaagttgctccgttaagtaccacaaagagcaaaataaaaatgatattcttcatattttaaaaatccttacaaattccaatcaaaattaacattaattaaggtaaggatattgattatttatgaacaacttttgctttggattcttacctttgcaaaaattttttttatgtcgaatatatatttagggtaccattttacaattgaaccaaaagaaccgggttctgaaattttaattgctgaattaggcgaaaaagcgtttgagacttttacagaaacggagaacggaatttcggcttttgtgaaaaaagatttatgggacgagaatattctggacgacatttatattttacaatccgaagaattcaaaatcgaatataccattgaggaaatcgatcaggtcaactggaatgaggaatgggaaaagaattttgaggctattgatgtagacggaaaatgccatgttcgcgctccttttcatgagaaaacaaacgctgaatttgatattgtaatcgaaccaaaaatgagtttcggaacaggtcatcatgaaactacacacatgatgattcagcatttactggaaatcgatgttcaaggtttgaaaacactggacatgggttgcggaacagccattttagccattttagccgaaatgaaaggcgctcagccaattgacgctattgatatcgacaactggtgctacctgaactcaatcgaaaatgcagaacgcaataattgccagcacatctccgtttacgaaggcgacgcggccttgctagccggaaaaaaatacgatttaatcattgctaacatcaaccgaaatatcttattaaacgatatgcaaagttatgttgattgtttaaatccgaaaggaatcttgcttttgagcgggttttatgaagaggacattccttttatcgatgcttcttgcaccgaaaaaggcttaacatatgttaaaaagtttcaaagaaataactgggtttcattaaaatacgtaaattagatagttaattatctgtttattaaatagttcacagatatcgatcttttaaattccgatgcaatctgtgcacactgtgaccaaaaaattagtaattacaacagtacaaaaaactaaaaaaatgagtactaaagaaaaagtaagagaaagagttcgcgaaaaggaagcaacaggtttcaataacgaaatcattgtttacaacgacgatgtaaacacttttgatcacgtaattgacactttgatgcgtgtttgcagtcatacgccagagcaagcagaacaatgttccctaattgtacattacaacggaaaatgcactgtaaaaacagggcctattgaaaaattaaaaccgcaatgtacccaacttttggaagccggattaagcgctgaaattgtttaattgcaaataatttaaaaacgattctattttattctatatttgaataaaatagaatcgtttttttatggaagaatacggaaagatattgattattgcaacgccgatttttttagtattaattataatcgaaaaattatacggcatttataaaaagaacgacaccgctcctttaatagacagcgtatcgagtatcagctccggaattaccaattcagtcaaagacgtcctgggattgagtctgaccttcatttcatatgaatggctggtttctaaaattgcgctttatcatctggaagccaacctactttcttatggtattgctttttttgtaattgatttttatggctattggagtcatcgatgggcgcatcagattaatcttttctggaacaaacatgccattcaccacagcagtgaagaatttaaccttgcctgcgcattacgccagcctatcgcaagtctggttaatttgtttaccttcttattaattccggccgcattgttaggagttccggcttctgtaatagccattaccctgcccctccatttgtttctgcagttttggtaccataccaaacacatcaaaaaaatgggctttctggaatacatcctggttaccccctcacatcatcgggtacatcatgctataaaccctgaatatctagataaaaaccattctcagatttttattttctgggacaaactttttggtacttttcaggccgaattagacgatgttccgccagtttttggtattacaagaccggcacaaacctggaatcctatccgaattaattttcagcatttaactttactgattaaagacgcctggcgtgccgaaaactggaaagacaaactcacaatctggtttaaacccaccggctggagacccgaaaattttgaagaaaaatatcctgtaaccaaaatcgaaaatgtttttgccttcaataaatatggtactcaaaattcacaaaagctaatttactggtccgtaactcaaatgttaatcacactattgtttgtgacgtatttatttgataatgtcgccaaaatcggattgcccaatatcttcctctacggattttttattctgattacaatctacagttacagcgaattgatggacaaaagtaaatatgccatcttttgggaaggattacgctttagtattgccataggcatcatcatgtactatggagactggtttggcttaaatcaagttatcccttttggtaatcctgttattttaacctatttgaccttatcctttttaattacaatttactttgtaaatattgattttaaaaactaccgaaaccaacctgttaattcataaaccgattatgagaaatcactatttttttaaatcctttattgttgtcagcattctatatctaattattttgtttttagaataccaaaatctggacttatttctaaaacctgttttggtaccattattaggattcggagtttattttcgcggaaagtttccatcaaaaaatatccttttgggagcattattattttcctggctgggtgatgtaattcttctttttgcagatattggtgagatttattttattttagggcttctttttttcttgattgctcacctcatgtattgcgtcctgttcaacaaacaaacaaagagaaatacttctatcaataaagttcttttcgcaattggcagcctgcttatagctttttatctggttgggatggttttatttttgatgccaaatctaggtgaattaaaaatccctgtaatcatttatgcagccgtaatttcgacaatgttgctgtttgcttttaatggtagtctgagttggaaaaaaacaggcagtctttacgttttagttggtgccctttcatttgttatttctgatagtattttggctttcaataaatttcatgctcccatcgaaaaaagttccttttttatcatgcttacctatcttgtggcacaatatctgattgtaattggtattttaaaactaaatactaaaaaagcagattaactgcagaatgtagtgatgcaaaagatttacaatcgtttttcccgtaaatctttaaatccttatcagctgtggtaaaaacactttacatttgtaggaccaacattaataaaccatgaaaaaaatagccctttttattgttctcattatcagcgtgacatcttgtataagcacaaaatcaactttaaaaaatgtagatgacaatgctcctgatcttgttttaaagaaagacaatacattttcgattacgcttttcagcaacgataaaaaatacggttacgaccctgattatcccgtgaacctgttttttcaaaatacccgaaatgaagctctaaacgaaactcgtttcttaaatgctttagcaggtccaaatggtgaaaaaataacctatacccgtctggaaacctgttgtccttttccaactaaaagaagcgatatgggtgccgggttcctgaatgtatatgaactgaaatgggacgggcaaaagaagccggtaaaactctacctgaacatttatgaaaaaggcgttttaatggtgccaatgggattgcgtttgaagagcaattaaaaaataaagttacactcaggattatactatgttagaaagcgtacctctaattgtacttattcttccattgctatttcagattatagccggaagaaaagcaattggtgaaactatatctttaaaattcggaacggtttgtataattagtctcatcgcgcaaataatagtacctgttatttccttttacattgccacctataatgctaataaatatatcgagcaaaatccaaattcacttagatgcgaaatggagtttgttggactttttatgttcacgcttatttttacgtttgtcctgatagtggttataatcattcaatacttcatgaaacgatcttacgaaaagtaattttttcatgatactgctaatttgcaaacaacatgataaatgtcatttattatctttttataacgcattaatattgcccttcatcttaaacatttaaaattttgaatgaagtcttgcaatagtctcgagggaataatcctgatttcaacataaattacacagcggataaccggattggcttcttaaaaaaaacataaatcttcatctgctattcataaatcataactacctttgcactgtcaaaaaaacatactatgaacatacaacatattccacaaattaagcatactgaaagcggcaacttctttttattagcaggaccttgcgctattgaaggagaagaaatggctcttagaattgcagaaaaattagttggtattaccgacaaccttcagattccttttgtatttaaaggatctttcaaaaaagccaaccgttcaagaatcgatagtttctcaggaattggtgacgaaaaagcattaaaaatattacgaaaagtttcagagacttttaacgttccaaccgtaactgatattcatactaatgaagatgctgctatggccgcacaatacgttgacgttttgcaaattccagcctttctggttcgtcaaactgatttggttgttgctgctgcaaacacaggaaaaaccgtcaatctgaaaaaaggacaattcatgagtccggaaagcatgaaacatgcggtacaaaaagtactggattgtaacaacgaaaatgttatggtgacagatcgtggtactatgtttggttatcaggatatgattgttgattatagaggaatccctactatgcaacaatacgctactacagttctggatgtaactcactcgttacaacaacctaaccagactgccggtgttacgggcggaagaccggacatgatcgaaacagttgctaaagcaggtattgctgttggtgttgacggtatctttatcgaaactcatttcgatcctgctaatgccaaaagtgatggtgctaatatgcttcatttagactatttcgaaggcttaatgaccaaattagtagcgatcagaaaaacggttaactcattttaatttcttaataccatttcattgaaaacaacttatttattcttctttttgctgtgtttttcagtaaacactttcgcacaggaagaaattacagtacaaagatatactgctcataataaaggtaagttttttgtttcctggggaggaaacagagaaagttacactaaatctgatgtaaatttcagaggaaaagactacaactttacagttgataatatgagagctcatgataaaccaaaaggatggcatattgattatgttaacccggtcaacatgacgattccgcaaaccaactttagaatggggtatttctttagtgaccattacagtgtttctgttggttgggatcatatgaaatatgtgatggcacaaaatcagatagcaaatgtaaatggttatattaatttacctgctgatcagaccggatctatttacaatggtgtttacaacaatagacctgtagacatgtctcagggcggtgcgcaggaaggtggtttcggaaaaggtgagatccaacaaaatggtcccgcttttttaatgtacgaacatacagatggcttgaactatattaatacagaggtttccagacatgacgatatttcgcaatggtttggcttgccaaatactgacaaagtacaaattaacttaacagaaggtttaggtgttggagttttatatcctaaaaccaatacgactcttttaggaaaagaacgtcacgatgattttcatatttcaggctatggtctttcagcaaaagcaggaatcaacttcacattcttcaagtatttttatgtacagggtgagttaaaaggtggttacatcaacatgcaggatatcagaactagtcaaagtaatgaagacagggcgtcacaggactttttctatttacagcgaattattgcggttggaggaattttcagaatctaatatttcttaaaattatacttaaaaatagttatcattttggtaactatttttttttgacctttatttgtcccgctaattagtagatggggtttcaggtttcaagttgcaagtttcaggtttcaagttgcaagtttcaagtttcaggttacaggtttcaggtttcaggtttcaggtttcaagttgcacgtttcaggtttcacatcttacatcacacattttacatcacacatttcacctttacaaaatgaaaaaatcaaaatatctctttccgattattaccttcttactcagttttggctgtgctttgtttgttgctctgaaggtttttcctaacaatccgttttcccctaccaaaaacaagaaggaaaacactttacaaactaaaattcaggatggagatattatttttcaaacctctcaatctccacaatgtgaagccgtacgaattgccacaaattctaaattttctcattgtggcatcatttacgatatcaacggaaaatggtttgtttttgaagctgttcagcctgtaaaactaactccttttaacgaatggattcagcacggaaaagaagccaaatatcttgtgaaacgattaaaaaactccgctaaagttttaactcctgtagtgctgcaaaaaatgaaagagtacagccagcaatttgacggaaaagaatatgatgcttattttgaatggagcgataccagaatttattgctctgaactgatctggaaaatttacaaaaatgccgcaaacatcgaattgtcaaaactaaaacagttaaaggattttaatttaaccgatcaaagggtacaaaaaataatcaaggaaagatatggaaatagcattccgctcgacgaaaaagtggtcgctcctgttgatttggccgattctgacctcctaaaaacggtaattgacacctactaaaagcctttttttgtcagtatcgacgaataaaacaaaaatacttcgtttctaaaaacttacatttttaaccccctgacaactcttcaacgtattaaaacgtttttaaacgaatatttaacaaaatagttaaaatcaaaacataaatctaacattttaatactattttagcagaataaattttaagttaggtttaaactatgatcgatagcgcacctaaatattcccaaaataatctgcattttttcccgcagttcgaagatttttttgactcttcacccgatttattgtgtattgccggttttgacggctattttaaaagaataaacccggccatgactaagttactgggttatactgaagaagaaatactctcaagacctataaacgattttattcttgaagccgataaactgactactacaaatgcccgcaaagaacttactcaggatattggtttgtataattttgaaaatcgatatgtgactaaaagtggtgctatcgtttggcttttatggagttcttttccggttgccaaagacagactcgtttatgctgttgctaaaaacatcactttcagaaaagagatggaacaggaaagaaatcttcatttggcagaacttaccaaactcaacaaggaactcagacagcttacttatactacggcacacgatttaaggtctccagtaaataacatactggccgtttttgatctcctggacaaatcaactattacagatcccgaaacgctcgaattaatctccattattgaaatttctacacaaagtttaaagaaaacattaattgatcatgtggcacttctggataaaaaaaatgaagaagacgatcagttggaagtcctgcattttgaagttgtattgaaagaagttttagactccattaattccttagtccacaattcaaaagccacaatttcaattgatttttcggaggcagaaacgattcttttcaacaaaacctccttaaaaagtatattcctgaatctgattaccaattcgattaagtactcaaaacccggttttttaccatttatccgttttaattctatccattttaacgaaaccacacaattgattatttcggacaacggaattggttttgatatggaaaaagtaaaagacaaaatttttgggttgcatcagaaatttaattcaaataaagacagtaacggaatcggtctttatctggtttataatcatgtaacgaatcttggcggtcacattgacgtggaaagtacccccaacaaaggggcaaaatttacgatcacgtttaaaagttaatcacataaatttctcaataaaaaaattccaaattccaataaggtcagccctattggaatttggaatttgaatttgatttttgcaatttagtttgcagccggaagaacaattcccccctgatccattaaatacatcaacgttgtcatggttgcagctccaagctccaattctcttttattaatagcatcaaacttatcgtttgccgcatggtgataatcaaaataacgttgtgaatccggttttaaacctgcttttacaatcgatttagaggtcaaatgattgatatctgatcctgcatgtccaatagtgaaactatgcaccaaataaggctcaaaaaggtctttaaatccagctattttcttaaaattagcgtcatctgcttcaattgaaaatcctcttggagaaaatccgccagaatcgctctctaatgcaaaaatatgattctctttcttttgtttcgaaacttcttcatacttagcgccaccttttcctccattctcttcattcataaacaaaacgacacgaatcgtatttttaggcttatagtttaagtttttcaaaattcgaactacttccatactttgaaccactcctgctccatcgtcgtgcgaaccatctgctaaatcccaggaatctaaatgccctccgacaaccataatgttgccagggttttctgttccggtcatttctccaatcacattatacgataaaacatccggcaaggtctcacaggattgtttgaaataaaatttcaacgatggatttactttcaaagatttacttaacaattctgctccattggtactgattgcggcagttggaatgtattgatcttttggtaagtcgccatagctttgagctcctgtatgcggaaaatcgtctaaacgcaagttcatcgaacgcacgattgttccaactgcacctaattttgccgcttcttttgcaccggcatacctttgatctacacaggctccgtaagatttaaaggtttcgatattttccggatccattggtctgttataaaacacaattttaccttttactttgtcgcctaattctgccagttctttgattccctttacttcgattacttcagcagtaagtccaattttaggggtagcaactgatcctcctaaagcacaaattggcactaccgttttcgttttattatctaaaatataagcggtttctttttcgccacgcacccaatgcggaaccattacttcctgtagataaactttgtcaagacctagagtctccaattgccttttagtatactgcactgctttttcggcacttgcagaacctgataaacggcttccgatatcgttagacaaatattctaaccaggtataacatttagactcggttagggcctttttataaaacaatttaatgtttttctcatcatttgactgcgcaaaagatgtcaatccgtttaaaactaatgcagttaaaagaatcgtttttttcataggttgtatagcattttttggttgttaaacaaaggaacaaaattctttagaactgccatcgcttttatttaacgatttgaaaaaaaaatctttcacttatagaaggagtatgtaggcaaacaaaataaaacctcttttttatagatagaaaacctataacactcctatgcttacgaaattattactagaaaccaattacatacataacaaacagaagcaagacctaacttaagagttttgaaaagatgagaatcaagaattaaattcctaagtagtcaagaaaaagaaattaagcatgaaattacaggaattataaaggcccatactgagttaaacgccgaaataaatcaaataactttcacgccccgaattggaacagtaacagtggttattattctcttaaaaactaatggttttagattgatacaaaataaaaacaactgatcagctatagatggttttttcttatttaaattacccgatctttttttgcctaatcctgaacttttgaataggagccatcgcaggtcataaaaaatgcagctagaaataactaccagtccacctctgcatcgtaactaaaaaacaagaccttttaattatataactcaatcatctacggttattacacagaacataccacttattaaacattacactttttttctatgaatcaaggataagtttgcttaaactttttggtttaattgtataaaaaacaattaaagcaacagtggttattttgaaaaaagattagtcataatctacaaatttttagtttagatatgttaaaattacctgcctttttttttagaatcaattattaccagatcaaatatctaattatacttttttctttattcgcttcttttttaaaccctatatacggtcaaaccaatttgtatacgaacgctgattttattaaaaaactgtataacgatccaaattacttgatttttaaagaaaaaatatacaaagaatttaaacattcgcattcagtatattggggagaatttataaaaggtgttaatgaagatttatacactaaacaaaaaataatagcatttacttttgatgcttgtggacgagagaaatcatacgcttacgattcacaattaataaattttcttcgaaagcaaaagattccgtcgactttatttattaccggtcaatggattgatgaaaattatgaaacctttttagaactatcaaaagatccattatttgaaatagaaaatcatggattttatcatagaccttgttgttcaaatggaaaatcaatatacggaattcaaggaacaaaaaatatttcagaagcagttgatgaaatagaagctaatgctcaaaaaatagagcgaattacagggaaaaaacctcgattttatagatccgcaactgcttatactgatgaaatttgcacaaaaatagctaaaaaaataggtgttactattgttagttatcatgtactagccggagatgctattccatttgcaccaaaatctgctattataaaaaatgttattcataatctaaaatctggtccaataatcattatgcattttaaccatcctaaatggaatacttatgaagctatgcaagaaattgttccagaattaaaaagacaaggatatagttttataaaacttgaaaatatttcccctaaaaaaaaataacacacagaaacatagactcccgatataaaaaaaactacaaaagaaataggaatatttcagtgaagtggaacgtcttttttacagatacaaaacctatgttactctatgtgttaaaatgaattacactcaataagacaaaatgaaaattattttacttctactacttcatttttcatacctattccgttttcattaaaagcttcaatggtaaaataataagtggttcctttatccagacctctaaaatcatacgaactttcgtcataaaccataatgctattatacaatttgtctggtgcaattccgtaataaatattgtaaccggtagtgttcgcctgttttttccaggaaatcatagcgtttcttgcatcggcagtatttctgtctactttaaaatcaagaactggttgtggtttttctgccaatccgtttccaaacactctgaaatctgaaatcgcaaacaatccggaggcattatgaacgttgaccattttaatgtaacgcgcttttattgctttcgtcagctcgacataatcatgcggaacgtcttttgcatttttagatttatcgactaccaatttccagtttacagcgtcatccgacatgaaaattttgtactgataatagatatccattgccttattgaactgtgttgctttatgatcggcatagttgatctgcaaggcattgatctgcatttgtctgcctaaatcaagctgtaaccattcacccggatcggctgtttttgcagaccagtaggtttgaatattttcgtcggttaaattcacagctccgtaacaaaacttctcgtatacttttttacctccattatccattctgtgggtttctacttccatacattcttctgaagaggaaacagtgacaggctttttatacgaaagcagcatccagccggaagaggctcctttttcctgattgcgttttttagagggaagaacaattggaaaatctccataagaagtaatagaatacatcacatcgtctttatcaaatccggcaggaaacatatcaatgcgacgctcgaaacggtctttgattgagatcttacaggttcccgtattccagtaattcccataattgtctgcgaaagtgtttccgtgtcccgctccgattacaaatcctcccggtttgtatgacatgggattgtgtttttgataggtgaagggtcctaacgggctgttaccaacatgaactccattggcataacctttaaattctgtggctggagctccgtattgcatataatatttaccattgtgtttggtcatccaggctccttctataaaatttccccagggcgcgggttccatatcattattggggccaaaacgttcccagccgtgattggcaggatctaaacctactacctctttgatctcaccataagcacgctgaatatcttctacttcaatggctttgtacagtttttcataagctgcctgattgcctttcggaagccaggtattataatcaacttctacacccacaagtggcaactttccacttgagccgtaatacatgtatacttttttatcatcatcctgaaaaatggcaggatcccaggtaggcagcatcgctttatcaacatgtcgcagccattgtcccgattttggatctgcagttttccagattggatgatctcttttccaggttgagcccacataaaacaaggtatcgttgactacccaggcggcaggggcgcattgatcgtcatcagctggcttgcgttggaaacttccgtatacaaatttccagtctgacaggtctttactccaaaaatatcccgcctgattggtcgcgaacaaatagtattcgcctttgaatgtaataattaccggatcggcactggaacgtcgggattccggaataccattgtgattttcggtggtataattgtacccaatattaattggattacagtaggtcgttgcttttttattggggtcaaaccattctgttttaccgggaattttagtgttttgtgcgagtattgtattgcttaaactaactagcatcagcataacagttactacatgtatatttttcataggatgatttttatataaaagattttctccaaaagagaaaacacagtttcaatagatctattttttctgttttatcctttgttctaacaactcaggttcattggtagtgatataattgaatttatgatcaattatccagtccatatcggccgtttcgtttactgtccaggcatttaaaataaccttatactctttagcttctttgatccattccggatgctttttaaatactgaataatgataatcaacgccgtttatacggtctgctttaacttctttcggagatttgtttccttcgagatactgtaaacttgttcgggaatcgacttctctgatttgtttcagaatttcgtaatcaaaactaatgtagcaggtgtttttatttgctttaagtttttgaattgtttctacagtcctcaacgccgtttttcttcctctttctttacttatttccgaaggttttatttcgcaaaccaaaagtgtacgtttattatttcgcttaccttcagcaatatactcgtacaaggttggaagcttctctccgtttgaaagtttaaactttataagatcggcataattggtttcctcaataggcaatttgttgtaatgtgcatcatgattgattacaagtgaatcatcggctgttctccatacgtcaaattctgaaccgggaagttttaagtcgatggcatgtcttagagcggctatagaattttcaggaagattgttctttttccatgccccgcgatgtgccactattgcattttctttaacacagcaggactgaaaagcaattgctactgttaaaagtaatgatatccgaaatgctttagttgtattcattatttttaatttatagtaaacctaatattgtaaacttcattgactatcctgatccccaaaaggactattgattcatctgtttgggaagatcgcaacttcctttgaacacctgatattttaaactttgattgatacaaataaataccgtattttataatttgtaagaaataacttgttttattaattttataatgtaattttgtaggattattaacctaaaaaaaataaaaaaaatgaaagatcaagagaatttaggaacgtatcctgttaaaactgatggcgacgatggtgcagctataaataccgttttttctcaattaagaagtaacaataccacctttaatggcaagccttatgatgcaagtatagccaatgttacatttgccaatttttacatgcaattttttgatgcacaaggtcacgtacaaggtctgacctattattacaatggtgatagtggtctatggaatcagaatggtgatacaacatacccggtgtacaatgatcaggtttctggtgctattgatatcgatttttcatctaattaatgttgaacctatttgcaaaaaacaatatgatcaaaggaaataatccaaaaaatctgtcttaattatatccaaaaatatagtcattgacaatacaattgaaaatagtgataaatatcttaaaaaaagcccttcgctaaccaattacgaagggctaattactaatcaataaaccaacttaattagttaatacaaaactaactttcttttcggcatttgaatttccaccaacgaaaacctcaaactgtccaggttctgccacaaattgtaaagcagagttataaaattttaaatcttccactgtgatctcgaatgtcacggtttgtttttctccttttttaagagttattttttggaaatttttaagttctcttaccggtcttgttaccgaccctactacatccctaatgtacatttgaaccgtttcttttccatcataatttcctgtattagcaacatctaccgtcacttttagcttttcgcctgagttcattttatcagatgaaaccttcagatttgaatactcaaaagtggtataacttaacccgaaaccaaatggaaacaacggctcgtttctttcgtcaatatagttcgatctgaacttttcgaacttaccttctgtgttaaccaacggtcttcctgtatttttatgtgcatagtaaattggcaactgaccaacacttcttggaaaggttgatgttagttttccggaagggtttacatctccaaacaaaacatcagcaatagcataacccgcttctgtacctgcgaaccaaacatttaaaatagccggaacagtttcgttctcttccttaattactaacggacgaccatcaaacaatactaaaacaaccggttttcctgtttttagtaaggcgtttaataaatctttttgggcctgtggaatttccagattggtacggctgcttgattcaccgctcatctctgcagattctccaagtgccgcaacaattacgtccgactgattggctacttttaaagcttctgccagtaattcttcttttgaacgtccgtcacggtgtaacgttttaccaaacatggttgctttagtctcaaactcttcatcgtaatctaagttgcttcctttcgcatataaaacttttgttgatgctcctgccacttctttgattcctgtcaaaagtgagattgcattttccattcttgtagctacactccaggttcccggcatgttttctttggcatctgccaagggtccgattaaagcaattgttcctgattttttaagtggcaacaattgattttggttttttaacaacaccaatgattgtgctgctgtcgaacgcgcttcttttctgctgtttgcagtgaaaatttctgtttttgctctattagcatcacagtacttataaggatcgctaaataagcctaaatcgtattttgcttccagaataagtttaaccgcattatcgatggtttctatcgttacttttttctcatctaacgattttttcaaagttcctaagaaaccttcacccaccatgtccatttcaacacctgcatttaacgaaagtgctgaaacagcttgtaaatctcccattccgtgctcgatcatttcaggaatccctgtaaaatcggtaaccacgaaacctttaaagccccattgttttcttaaaatatctgtcatcagccatttgtttcctgttgcaggaattccgtcaatctcgttgaaagaagccattactgaacctacacctgcatcaacagcagctttgtaaggggggaaataatcgttaaacattcggatatgactcatatcaaccgtgttgtaatcacgacctgcctccggtgctccgtataaagcaaagtgttttacacaggccataatcgaattgtttttagaaagatcgttttgctggtaaccgtttaccattgcttttgcgatctggcttcccaaatacggatcttctcctgaaccttcagaaactcttccccaacgcggatcacgagaaacatcaaccattggagagaatgtccagttgataccatctgcactcgcttcctgagctgcaattctggcacttctttcgatcagattcatgtcccaggtacaagataatcctaacggaatcggaaaagtagtttcgtaaccgtgaatcacgtccattccgaaaatcaatggaattttcagacgacttttttccactgcaattcgttgcacttctctaattttttgaacagatttaatattgaacaaacctccaactttaccttcagcaatttttttcgccacatcagaactgtttgcctgtcctgtagtaatatctccagaggttggtaaattaagctgccctaatttttcgtccagtgtcatctttgacaataactctgctacaaactccgattttggttttatttttactgtattcttagtgttctttttctgagcatatcccagaacagcacatcctaaaaacagtaagactaatttgttcttcattctactatatttatttgtttgtgttcgttttttattggtttaaatgcccggccataaaatgctagactgtcataagctcctgttactagaatccgtactttccggatttaaaaccaagcttaaccaaaccttgttttacttcgggagcattcatgaataatttccaaagcaaaccggtacgataattttcaatcattacgacttcaggtccctggtcaatagccaggtaacgttttgcaacccaattattctgtagactaagcgcatcataaaagcctgcctctccaaaagtttcctttttatgattttcgtataaatttctaattacagcgattgattcttttggtgtatacacaattgaactaatggctgctgttggagagataactcctttatcgttgcttggcatgtgagcatcgtacccaatagatccgtcagggtttctggaataagatgcagttaaaccccaataatcggctccgtatcctttaaattttcccggattttcaatgcaatactggtagtctatttttacctgattgacattcagatcccaatagttggcatacttgtctgtcagctggttcggatcaagtcctacatacgaataatgtgcccagaacattggtccgccaaattcctcggctccattgtgttttagaattagaggaatattgtattttgttttagaagaaactattccgccgcttctcgcccagccttcgtgatacgcttttgcatcgatcgcgtgtgttggcgaagaggctgccatgacataggtaatcaaacattcgttgtaaccttcaagagcaaaattcatttgccagttgtaagttggtgaccaatgccagtacaaaacatttttattattagtgtaccactgccagtctactcctttccaaagtgcatcgtatttttgagctaccgctttttctttctctgaaccgtcttttagatattcgcgaacggtaatcattcctgcaaccaaaaatgatgtttcgactaaatctccaccattatctttggttccaaaaggttttacttttcctgtatttccatctatccaatgtgaccatgctccatgaaaacgatcagctttgcctaaaaaatcagcaattttgttcagtctttcaactcctttttctttcgttacatatccttgtgacattccggaaacaatagccatcaatccaaaaccggaacctcctgtggttacgatatgtgcatcgttttcagggtaaattctatccggatggtaacgttctcttgctaatcctgaattgggctcagcataatcccaaaaatatttaaacgtctctttttgaaccacagctaaaagctgatcgtctgttaattttactgcagatgatgaggccttttctgtttcttttttttcttgtgcattacagcccaaaaaagtaaaagctaatagtaaaactgaaattttaaccattatattttttttaatatcagtgaataaaaaccacttccttcaaaaaaaagaaggaagtggttttaaaaaattatttagtaacctcccggattttgttgcgaaagtccacccgcttctcttaagaatgtagtaggaattggaaataattcatgtttaccaacaacgaatgtttttccgtcggcagccatagcagcctgagcttgtcccgttcttacaagatcaaaccatctgtcatgctcgaaagccatttctaatcttctttctttccagattgcttttctaacatctgtttgagaagtaaaaggagtatctcctaaacctgctcttttacgaatcatattcactaaaggaattgctgctgatgtttgtcccaattcattcaaagcttctgccttcattaataatacctcagcatatcttaaatatctaagattggtatctgtaaattcctgattgtagaaatccgaagaataagctttgtaattgtacattggatttgcgacagtagccggtaccggtcttccatcgtataaaacggaacctctgaaaataatcgttgctgctcttcttacgtcgcctgcttcataagcatttgctaacccctgagtaggtgtattgaaaccccaaccccatcctcctgcaccacgtggtgcctgagaaacagagtagtttccaattccaaaaccagggcttgaagttgaaccaattccattaatttcaaaaatagactcaggaccaaattctcctgcttttttatattgtagcgcataatcagctactaaagaatatcctgttactttatcacaattgtcaattactttttgccaatttttttgatataaatttacttttgctaacagagcataagcagaccctttagaaacacgacttttgtcttctgctgcgtaagctgatttctccggtaaatttgtaatggcatcattcaaatctttctcgataaatgcgtaaacttcagccggtgttttacgggttaattgcataattctgtcaccctctgaacccggaattggcaaatgatcaataattggaaccccaccgtaaccttttactaaagtgaaatacataaaagctctgaaaaacttagcttctccttctaatcttacttttaaagcaggtgtcaccttatccaattttggaaaaatagccaaagcctgattacatctgtttattccggcatactgagcatcccacgtagactgaaatgaaggagtcgaagcattatacgttaaagcatcaacaatatccttatcgccaccggtgtctccgggatcagaacctttatcagcatcatcagagataatacttgaaactgcattccatccaaaagaggacatctcccaacctaaaaactgattgtaaattgccgttacaaaacctgaagctcccgcatcgttattgaccaattctacatcggcaggaattgattctgtaggatttacatctaaaaaatcatctgcacatcctgcaaaaagcaatccggacagtacaaacattgatatatatattcttttcatgatattaaaattttaaattagcaccgataacaaatgatctcaatgacgggtacgcatctaactcaaccccctgagtgccttcaactaacttaccatctgacactacatcaggtgaaaatcctgagtatttttggctgataaatgggttaattgcattcacatagattctgcaatagttaaaaaacaaatcctcttttaatggcaatttgtatcctaagctcatgttgttgattctaaaataatctgccgattccaggaaaaaagtagaggcataaggaatctcattagaaggcaccggatttgaagccgttgtgttagttggtgtccagaaattgcgagccacggatgcttctatattttcaccaccaaaacgttgtgctttttttccattgtatacttttgctcctcctgttccgtaaccgtcaacagaaaaatcaaagtttttataatttatccctaaagtgattccgtaagttgaagttggtaaaaccgttccaacatattttttatcggttctctcgtttaatgccgtctgaactactttatcaccagtagcggtataatacaacattttaccatttgacggatcaataccagcaaactcatacatatagaagcttcctaaaggttgtcctactgaagtattatccagtattttagtattttgtccatttcctaaacttcctccaagagttggagcaatttgaacgtttttaagactggaaagttcgtttttgttgtgagaaaagtttcctccaacccaataacttaaattatcgcttattttatcgtcccaacgcaaagaaacttcatatcctttgtttgatacttctccgatatgtgaataagttgaaatattgtatcctgaagttgcgtaaggtctaacattcaaaatggtattggttgtttttttgtcatacaaatcaaaagatccttttaatctgctgttaaacaattcaaaatctaaacctccagaaagttcctctactatttcccaagataaattaggatctatttgcgaattaattgttattcctgaaccaagtcccggtaaatcaactcctgaagtaaaaacctgagtattcaatggtacattctgatttcctaatctaccccatgatcctcttaattttaataaattaagtgtttcaatattacttaagaaactttcttttgatataatccaacctaaaccaactgatgggaatgttccccaacgtttgtcttcggcaaattgagacgatccgtcacgtcttacagtacctgtaagtaaatatctgtccattaatttgtactgaaaacgagcaaaataagaagctaatcttctttgattcaaagcttcatctttataacctgttactgaacttgcaacattaatatcttttaaagaccagtagtttgaatttggatttacattttttcggtcaatcgttaatttttctctggttccttgtacgttggcctctataccggcagtaacttcaacatcatgaatttctgcaaaaactttattataagtcaggtaattagataaattccagttgaaatactgatctctgcctcttgtcaaagtatttgtatttaaacttttagtatcgtaagcagatactacacgagtaggatctcctgataaccaaagtcctaaattatctacataattatattgtttgtaagtaaaaaactccccattaaactgagaggtaaattttaatgatttgataatatcataatccaactttaaacctccttgtaaaataacagtctcttgtctctcatttgtaaaatccaactgagccaccggattcgcaacattattgaaagatgctcctgtttcggcaaccactccatttgaaacaaatggcactccatatttcccattaggataacgtacaggaacaagaggagattgtctgtaagcatttgtaaaagcgcttaaaggcattggagtatttttgatggtactcacactcatattctgagttaatctaactttatccgaaattttaaactcattattatttcgaatcgtagttctaccataatcagatcggttcagaattcctttttcttcataatttccaacactaaaaaagtactttacattatctgaagaccctgaaatggcaatattgttttgcgtataagatcctgttcttgtaatttcatcaaaccaattggtattgtaaggctgattggcagaaaatcttccttgtggaaaatcaccactgtaagcaatattactataacgaacatattcgtcactatttgccattctaacctttttcaaaggagttctaattccggcaaagctttctacatctaccgtaagttttccttttccggatttcgtggtgatcataattacaccatttgcacctcttgtaccataaatagctaaggaagaagcatcttttaaaatctcatacgatgtaatatcatttgcattaatgttattgatattctccgttggcataccatctactacatacaaaggattctttcctcccaaagcactaccggctcctctaataattacagaaggtgtacttcccggtgcatctgaagcagatacctgaacccctgccgccttaccttgtatggcctgagaagcatttagtaccttcatttttgtaatctcttcagatttaatagagcttatcgctgaagtattatcaattttctttcttgttccgtatccaattacaactacatcttttaatacagtatcacctgattcttttaaagtaatagtcattggtgcggaagttgctgccacagaaataggatcaaagcccaacatcgagatttttagtatctctcccactttggcatttatggcaaaatttccgtcgaaatcagcatcagcagaaactcttgagtttgaagcagcaataattgctccgggaactcccattccattactgtctactacttttcctttaattgcttgtccagacatataagccggcaatagcaaaagcgctaaaaagctaaaaataaaatttttcatacagttcgtaatcgtttaagttagtagagccaaattaaacaattacaacgttgtagtacatcaaataccactactacatagctacatcattatgttaaaaacagaatataaaagtttaaatttcagcattttaaatgttaattttattttattaacataacgttatgatgtagtaatgatgtattagaattatacaataaaagaagtagaaaaatataagatatttaaaaaaataatctcaatcttacagacttaataaaaactttgagaggttttcatcctgagtaagccctaatttctttctcaaacgatatctgtgcaattctacgcccctaaaagagatgttcatcataggtgcaatttccttggaagaaagattcattttgaggtaaacacacagttttatatccttaggagttaagtttggaaactttttagaaaggttaatgataaattcattgtgaatctggttcagattggtttcaaaaatctcccattcgtgtttgttcacctcattgattttaattgcttttttgatttcgctcttcagtttattgaagtctttttcagaattcaaaatgttctgaatgttatcaatcatttcactttgcttggcaatggacaatgattttccggcaacttctgaggattttgtttgcagttccagttctaaaatgtgtttttcatactcctgaacattcaattcattctccgctttcagttccatttccagaatctcacgctgatgttttaactcttcagcttgtagcttcaatttttgcatatagcgtagcttgttccatttgtaatagaaaaacaaaaccgctcctactacaagcagatacagtaaaatcatccagaatgaaaaataccagggttcagccactttaaaatcaaagtccgttacctcttcgtaactcgcaccatcatgtttgtaaaccactatagcatgtgaaccactgcttaaattgttcaatacaatcagtccatctgaaattggcaggaaatcgccatttttattgattttataaaacaaattaggcttacttgccccgtaaattcccgaaattacatttattcttatctcagtgttgtatttgatcttatcttcatttgatataagatttccatcattaaaagcttctatttttacatgagcattttgcttgttttcataagtgagctgaagcgatataaatccatcatcaagattgagtaaatagtggttctgagttttgaaaatcctcagattatcattgatcagggtacctttataatatttctcctgaataatgttccaaatgaatttattacccttcgcatatatatgatacaaaattccattctgcagcactacaaaatgatcttcatcaattgaaacgacatcacttatgttcttaaaattagaattaaacagttcattttcttcaagactgccgctaatcgaattataggtataccaaacattattgattaggaaaagaatttcatttctaaattcaaaaatctttacaccaaaatcattcttaattttgctctgctgtgttatattttcaacttttttagtcttatagttatcatcgtacaatacccgatacaatccgcggtaattatctgcagcccagatttcatttttctgattctgagcaacatactttataggttttgaaagatcattaataactttgttctcagtaggtactgcgatatcattgtaagccacaacaccgctgtaagtcgattgaaaataagtattattgatactgctttttgtcaagttccatcctccgcttctgttattgattttaaccagtgaaccattttcgtaacaaaaagttccatcattatgacctataatatatttggtaccaattttactaatattccaggcctgcccctgtgtattgggcaacatattaaacttaccggaaacaaattcgaaaactccgtgatttgaagcaatcagatatcccttatcaatagctgcaacagaataaacagaacccagaagtcctgaattatcataaaagaaagaaatcggagagttgatttcgacatgcgtaataccattatccaaaccaagccataaatcgttctctttatcgaaaccgatgcttaataccgaattattcattaagacattgttccgattgatgtttttataggtatccgtttgaaagtcgtaaataaaaacacctctgttcccggttcctactaccagtttatttcctttaataaacttagcaacattaatcgttgccgattttaaaacttcattcaacggattattccagggttttaaacctcctttttctacaataaaaattccttttttctgtgtaaaaataaacgtctcgttcttgtacttttcaatagcgtgaactacagtcttttttaaaatattccaacctttcggattggctatttttgaaccgtccattcgaaaaagaccttttgcaactgaagcaacatagacattatcatccactacaaagcaataggatattagaaaagggaatttgattttcttaatgtgttttccatcataaataaaaacatcattaaaagactggaaatagacggaacctttaaacttgaaaattttccaaatctcttcattgtccttttcgtcaaacaaacgcagttttttagtgatggaaacgtaatgcatctttccctcttttcggtaccagtaaccaaactctttatatgagcctgaatagatcttatcgccttcgatcatgatcgaacggatgatcgttttattaggtaatgtatacttttcccaaatgacaccatcataacgcaataaatagtgattattggcaaaatacatggcatcgtcattgccctgaaccacattccaaatttgattgtcaccttggtaatcagatttattataattttctacgaatggaagtaattcttgtgcctggatttgaaaagcaatgaaaaagaagaatataaatttaggaagtatcgatttcaaaatattcggttttatcttcaaagatactgacaaatattgaatctgatggcataaaaaaagctcctcaacagagaagctttccatataatagtaagtctattctagctttgaagcagctgataaacctgatgagcaatttcgtattcttcatctgtagggattaccaaaatttttgcttttgaatttggtacattaatctctctgatttctttagaacgaatctgattcttttcatcatccagttcaattccaaaataatccatatcagtacaaaccagcttgcgcatataagaagagttctctccaattcccgcagtgaaaataattgcatccaaaccgtttagagctgccgcgtacgaaccaatcgttttttgaattctataggcattcattaacagcgccaattgacagtctttatttcctttttcagcttcggcttcaatgtctcgcaaatcgctgtagcctgtaagtccaagcataccactttgtttcaataaaattgaatttacttcgtctgccgaatacccaagattcttaaccatataaaaaataaccgactgatcaatatctcctgaacgagttcccatgataagaccgtttgacggagagaatcccatcgtatgatcaatacttttcccgtcttttatagcggtcatactgcagccatttcctaagtgaatggtgattattttagaattcttttctaaataatcaattgcttttgcagaaacgtatttatgactggttccgtgaaaaccataaacacgcactttatgctctgttaaaagataatttggaatggcaaacttataagctacttccggcatcgtttgatggaatgcagtatcaaaaactgcaatttgctctgcatcactaaaaatttcttctgcgacattaattccttctaaattagctggattgtgcagtggtgccagttcaaaaagttctttgatttttaattttaccgcttcatcaattttcactgtatcgctaaaggcacttcctccgtgtaccacgcgatgacccaccgccgcaatctccgaggtcgatttaatcactcccctttcggcatctaaaagcatattggctactttttgtaaaccaaccttatgattagcaatcggtagtgtttcttcaatggtatttgacggggttttgaaaattacatttgaagtttccaatccaattctgtcaatcataccggtacaaattacctcgtttgtaggcataaccattaattgatatttgattgaagaacttcctgagtttatgataagtattttcatttttttttaagattctaagagattgactctctaagttttttactgtttttagctttaatgtcaccctgagcgaagtcgaaggctgggcaaacaaagaaggcttcgactccgctcagcctgacttacattttttaattaattaaagtccttgtgcctgaatagccgtgattactactgtgttaataatatcatctacggtacagccacggcttaaatcgttcaccggtttatttaacccctgtaacatagggccgatagccaaagcaccggtttcacgctggactgctttataggtattgtttcctgtatttaaatccggaaaaataagcacactcgcctgccctgctacttcagagtccggcattttgctttttccgacagcacgatctacggcggcatcgtattgaattggtccttcaatttttaaatcaggacgtttttgttttacgatttcagttgcggttcttactttatcgacttcatccccttttccggaagaaccggaagaataagaaagcatggctattttaggctcaattccgaacgctgagcttgattctgccgatgaaatggcaatttctgccaattgttctgctgttgggtttggattaatggcacagtctccaaaaacagaaactctgtcttctaaacacataaaaaatacagacgacactacagatgaattgggcttggttttaatgaattgcaaagcgggtaaaatggtatgctgcgtggtatgagcagcacctgaaaccattccgtcagcatgtcctttatacaccatcatcgttccaaaataagaaacatcttccattaaatcccttgcggtagtaatactaatattcttggctttacgaagctcataataggtgttagcataatcttcataaagctctgattcaataggattaataatattgattttagaaaaatccaatgtaattcccaattcattgaccttcccttcaatttgttttttatcgccaatgatcgtaatatcaaccacatccatcgacaacaatctagaagcggcgatgataattctctcgtcgtttccttccggtaaaacaatgtgttttcggtgctgtctggctcttttaaccatgttgtactgaaacatttttggcgtcattccttctgcttcaaaagtaattagcctttcagacaaatcatccatggcaacatacttttcgaaagtactaatcgaggtttctattttatgagtattattggcgtagatttctgatctgatggatccaattttgttcgtgataccataagtcccgccatcaactgctataataggtacgatggatgaaagaccttctataagttttaaaatactttcttccggaactatatttcccgttagaataattccggatatggttggataattggccgattcgttggcttgtaaagctccaaggataatatctgaacgatctccgggagtaatcaccagtgcattatcatgcaaatgaaccagatagttgtgtaattgcattgctccaacactaaaatgcccgatttcattattcagataagcacctccaaacagtactttggcatcaagctgattgactatttcctgcatggttggattgttcaaacttgaaatcagcggaatggtattgataagcacattcgccggcaaacttttttgcaatccttgtgtcaccaattcgatgttttcaggctgaactttattggcaataaccgataaaacctcaacttctttcactttaaaggaatcataaactaaataaaggctgtctactaattcttctaaagttttaccaactccggatccgataataatagtaggaattccaaggtttttagcgatcaaaacattcaaatcaagttcgattgaagttccttctccggtaaagcttgttccttctaccaggacaaagtcaaaacgctcttcaagcttcttatatttctcaataatcaaatcgagaacttctcctatttttcctttattctttttcttgattagtttgcttttggtgatcgcaaaggcatcttcaaatttaatatccagattaaaatgtgacagtactgtttcgatatgattgtctaactcgccatctacaaaatcctccacaataggcctgaaataacctactttagccgtttttccaatcaaaatactcatcaaaccaagtgttacaattgattttccgctgttttgatcgctcgtagctatatatattgctttactcataatttatgtattaactcaacaaatgtcgtatataatctattttctaaagataaataaacgttaaaaccaacgtctttttttaaaataaataattaaggctatgaccaataaaaacatacttgccattacaatgaaatagccgtttctctcctttaattccggcatatattcaaaattcatcccatatactccaacaataaaagtgagcggaataaatatggctgaaatgatggtcagggtcttcataatctcattcatttttcggctttgctccgaaaaatagaaattggaagcgctttctaaagaactcatatcagactcaatctgctccagaagttctaaacttttctgatgcagtctaatgaaaaaattaaaggtttccttctgaataaggccattgttttcatcatcatctttaatggtcttcaaataataaagcgaatcacgaagcggagtgatggaacgttttaaaaaattaaaattatcgcgatgattttcaattttttccagaataatcggatctgctccttttttggttaaatctataagttcttcaatattatcttcttcatcttcgattgtaatataaaagttttccattacggcatcaagcaacaaataaagcagatagtctacttttttagttcttacgattccggcatgggtacgaaggcgttcgcgtatgtgtgtaaagaagtcacttcttttttcctggaaagaaatcagtattccgtcttttaaaataaaactgagctgctcgaccttaagaccatctgagtattctgaaggcaacaacgattttatgttgaaaaacaaaacctctttttgttcctcaagtttggttcttttggtcgtatttaaaatatcagccagtaaaaaatcatctactttaaaatgatccccgattgttttaataagagcgatatcatttaatccgtgaatattcaaccaattgtttttagtataatcaaaacatgaatttatggccaaaaccgtaaatttctcatattcaacaacatcagtatcattataaacaaaaagctgcatttctgtttcatggcttttatgtgtgcccgtgtactccagacttgtatgctgcaactttctgcctttcttgtattttatctttctcattcaaaaatgatttacaaagtaatattacgaaaaagaatctgaatgggaaatgacaaatgtcattttgatcagaagacaatgttaagatattcataataataattacttttataaacagcaatctgtctataaaatataaagccaaaatgacccgaaaaataaccatttcaataccaaaaccttgtcatgaaaactggcatgaaatgtctccaactgaaaaaggtaagttttgcagcaactgtcaaaaaaatgtaattgattttacaaaatcttctgacagagaaattcttcttgcttataataaaaatgaaaatttatgcggtcgattcatcgtatcgcaattgaacagggatatgattattcccaaagaaaaaagatctgtgtggatggtcgcagcagcatcaataattgcatttttaggattaggaaatcaaacaatcaaagcacaagaaaaatcaaaaacagaacaaacagaccgtaaacaacttaaagacagcataaagtcaaaatctaaaaaagactttgtaacctatacaggaactttatatgattctcaagataatccattacccggggttaatgttaaagtaaagcaaactaaagttgaaaccaaaactaattttgacggagaatttacaataaaagcaaaaaaagggtacattttaatattccaacatgaaaatttcttaaccaccgaatttaaacttaataacgatattaaaattaaaccgaaaatgagagattattttcttaccggagatgtggttctgacagaaacagaagatgattaaatatcattttactaattataatccataaaaaaaccgagtcatttctgacccggtttattttggaacatatttacattgcacacttttgatttctaaaagtcttccatgttttttcgcaaaagcctgttttaaattatttgtttctgctcctgataaagggtttctggaactcacaataaaaccgaatcttttctctttaggaattctaattacactatcttcaaaaatatttattgtacttattatttgatctaaagcaatcttaacatcctttccttttaattctacaaaataaaaatcattgttaaagtgtcgaacaaaaccaaaatcacatttttgaacttgttgcgaagttattaaacaattatctattctaatttttgtaaaatcttcttttgaatcaatttcaaatctttttccattttcagaagctactttactttttgaacaacaaccttgatttgctataattaattcatcaaaactattgtgcatatcgtaactctgttaatttgtcaaattcctcagaaataatatctgaaactccatcaattgcatttgtatctatacatttttgagtgaaataaggcaaatttttatagaatagcagcgctattctataaaaatttaacgaagttgtagccgaaaatcataataaggaaatcaataataaattttaaactggttcttagtagataaagtgttacttttgccccgcagaccgccttatcgtcgttccgattgatcggaagggaggaaagtccggacaccacagagaagcatagcgggtaacacccgtcggctccgatttatcggagttaggacaagtgcaacagaaagtatgtacaggtaatgctgtagtgaaaccaggtaaactctatgcggtgaaataccaagtatatcagcatttaagggcttctcgtccgttgttgaagggtaggtagcttgagttccgcagtaatgcggaatctagataaatgataaggccctgatttatcggggacagaatccggcttataggtctgcattttttatatatttgtgaaactctctaatctaccttcatgaatataactactccaaaatcttcaaaacaaccccaaaaaagcacttttaggcttatagttacgaatcttactttttgggttcttattgccattattgccggaattttgctcggtcatttttcgcccgcgaatggtgtgaaaatggaaatactgggagctaagtttattgcattgatcaaactctttattgggccgattatatttctgacgattgttttgggaatttccggaatgggaaacctgaaaaaagtgggccgaattggaattaaagcactaggttattttgaagtggtttcgaccgtagctttggccattggtgtggcggtagcttatttttttaaacccggtaaaatcgacaaatccagtttgactttgggagatgccagtcaatatacaacgaatgctgcggagcatttttcctggctacagtttttcttgtccaattttacattacaagtattattggctgctatcgtttgtggtattgcattgaatttttatagaaaaagagaacagacaattctggttttagaacgtttttcgaatgtggtttttctgggattaaaatatgtaatgtatctcgctcccattggtgcttttggaggtatggcttacactattgggaagtttggtttacaaaccctcattccacttgggaaattgatgttgtgtgtgtatctgaccatggccctttttgtttttctgattttgggaagtattctgagatattataaaatcaggattctttctgttttgaaatatattaaggaagaacttttactggtgctcgggacttcctcttctgaggcagctttaccgagtattatggtgaaactggaacaaatgggatgcagtaaatcagttgtgggattggtgattccaacgggttattcttttaatttggatggaacttcaatttatttgtcaatgtcggtgatatttctggcgcagctgtatgacgtacatttgagtttttttgagattttaagtgttatcggaattttgatgattacctcaaaaggtgccgccggagtaaccggaagcggatttattgtgctggcttcgactttaacggctttgcataaaattccggttgaaggtttggcttttttactgggagtcgataagtttatgagtgaagccagagcgattaccaatttgattgggaatacagtggcaacaattatcatttcgaaaacagaacgcgattttacagagctgaatctggatcctgttttatctgagttatgagttatgagttattagttattagttgtgagttgtggattgtcaaatgtaaaatccgtatcaatccgcgttttcacatggtgaatccgtgccatccgcgtgttatttttttatcagaaagagaaatgttaaatgtgaggtgtgagatgtgaaacttggaacctgaaacttgaaacctgaaacttgaaacttgaaacttgaaacttgaaacttgtaatttgaaacttagaatttgttaaatagaatttttatgaaaagaattggaattttaggactcggtggagtaggtggttatttcggcggacttttggcgaaagcctattataaatctgatgaagtcgaagtgatttttattgctcgtggcgccacacaaaaagctattgctgatagtggattgaaaatagtaaccgatgaatcagaaatgattgtgcatccaaaactagtttcaaataatcccgaggaaattggtgaactggattatttaatttgcgcaaccaaaacgtatgacattgaggaaagtttactttcgcttcaaagctgtattgtggctaaaacggttattcttccattgtataatggagttgatgctccggaacgcattcagaaaatattccctcagaacgacatactgcaaggctgtgtctatatcatttcgatgattactttgcccggaaccatccgaaaaatgggtttttatgaaaagctgttttttggttctaagacggtttctacttcaaaattagaagaattacaacaaatttttcagcaggccagaattgaaagttattgggtagaaaatattgaagaaacggtatgggagaagtttatttttatttcagcattggctacaacaacttcctatctaaatcagaatattggtgaaattcgggacaatccggatactatgtcggtttatgtgggattggtgcatgaaattgatgcggttgccaaagcgaaaggattgcagctgccggatgatattgtaaatcagactgtacttaagttagaaaaatcaccacgcgaagctacatcatcgatgcatagagatctactggcaggtaaaagtaccgaagccctttcacttactaagtttgtgttgaaggaagggaaaaaatatggcgtaaaaacgccattgtacgaaaaaatttctaatgtattgctgccttaaattttgggtttgtttctagtacaggtttaggtacaaatgagttaagggatttttttttaattataagaaaatactttcttttttttaagtttgattttgttgtttttatcttatttttgaagcaattaagttaaaaaccaaaatgaaaaaaaattatctgttcttatttttatctgttcttgttaccaatgtcattcaggcgcaagatgaagtaccgtcggtagaaaaaaatcaattcaaaataaatatgatcgctccgggattcgtttatgagcatggctttacggctaataacaccctttattcagaaattagcttaggggttggttacagttataacagtttctataacgagtcaaacgtttatttttccccgttaatcagtgagcaatttcgtcattattacaattttaaaaagagagctaaaaaaggaaagagtacagctcataactcggctaatttttttgctctaaatgcccagtataattttcgaacggtttctactaacgagaggtatagagaatatgcgccatcaacaaccattgcggtactttggggattgcagcgaacttacaaacgaaaattcaatatggaatttaatctgggtcccggaataaatattgatcaatacgataccgaatttgttccggtagttaattttacattaggttgggttattggaaaataagcacaaaaaaatagaaaaaccttggctaaatcaaggtttttctattttaaattccaatccaatatttcgggtactctcaatgctgatttttggatcggaattaaaatattttctgagtctgctaataaaaacatccatacttcgccctgagaaataatcatcttttttccagaccgacattaaaatttgatccctctttaataactggttatgattcaggtacaaatactcaataagagaagcttccatttctgtaagctgctggacatgatttttgttgtttagggttagtctttcgttatcaaaaatataagacccaatttcgattatattgtttccatccagacttctcttttgttcgattctttttagaatattgtgcaaacgcagaatgagttcgtctacttcaaaaggttttataatataatcgtctgcgcctagttttaacccgatgattttgtcttcttttaattttcgtgcagtgagaaaaataaatggaatctcagggttgattgtaattattttttcggccagtgaaaatccgtctaattttggcatcatgacatccaaaacacaaatatcaaaagtctgatttgaaaaatagtctaaagctatttctccattttctgcccagatgacttcgaattgatgcaattctaaatattgttttaaaattgcggcaaaatcaaaatcgtcctcggctaaaagtaattttttcaaaataagggaattaaacttttaataaaatagtaaactgagttccttttccaagatcactcacaacgctaacagtaccctgatgcgcttttataatctgatcaacataatacaatcctaatcctaaaccttttgtattgtgaagatttccttgttctacgcgatagaatttttcaaaaagaagcgattgtttgctcttttcaattccgattccatcatcttcaacgctaattgaaaattgattttcgttcagatttgtttttagtgtaatagagttggagccatattttaccgcattttccagaacattcaaaagagcagtggtcaaatagaatttatccagatgcaagcttgttttctgcgtctgaaaattggttttaatgtcgattttcggataggtgattttaaaatcattaacgatcgtcaatagaaaattttcggtttcgatattttctttttgcaattcgattccgttttcggccagcgaattggccatcacctggtcaatcaaattttgtaaacgattgttctgacgtgaaatggtattgacgatagcattaaagttctcgtcattatcccgaatgtcttttcgctccaatattttggtcgaaatgcctaatgtcgtcaatggggttttaagttcgtgggtaatattattgatgaaatcggttttaacatcgttggccttcttctgtttgattaatgcttttatagcaataaaaaaaagagatattagggttgctatagaaagtaaagacaaaatgagaacgaaagtcattcgttttaaaatgatcatttcccagtcgattaccgaaacgtacatcgaatcctcagtcaataatttgtaattcttattttcaaaagttccgttggtagttccaacataattccgaactaaaaaggcatgatttaaggagatcagatttccgtatagtttgttttggataaaaggtttttcagagaaaatagtgtctgcttttgcgtggtttgggtacagaacaaatttattcaggacaatcgcaaaatctatttttaactcgggtaaatctcttttaaacttgctctgaattttttgtgtcaaagcgtcgctatattcattttccagaatatactttttgatctcaaacttgttgttttttccctgaatgtaattttcagataattgctggtaaagtgcttcttttttggcgactattaccgagtctatgtcgctataatcattagagataccggcaattttatttttaatttcagtgtgaaactgcgccactttataatcgtaagttgtttttaccaaataacattgcactgttgataaaacaattagagcgatgaccgaaaatgctattagtaaattgattctttgtttcatgagttgttttgttggcacactgatacgacagattaaactggtttacgcgggtttgttttatttaaccctttgtaatggttttaatacatagaaaaatagtttcgtttgcctaaaaaaagacgtttcacttatttaaaatacgcatcttctatgtgaaagaaatttatttcttttttgcctcctttacgtcacctaaaagctatgtatctatgcgttttataattttctaatttgcgtgatgagaatttatttattaaaccggcgcaaatatgctggctattctcaatccaaaaataatgcttttgtcagacaataatcacattaactccgcattaaccttcaattaactttcataattcttttttagaagcatttttgcaggactataaactaaaatcaaacctaaaatgaacattaatttgctggtaaaactttttttaattctcttttggttcttattttctttaacgggatatgcacaaagcgagatcccaaaagacagtctttcaaatgcgttaaatgaagttgtgattgctcagaataaaaagacttttgccaatacaaacggaaatgtaaaagtcgatgttgccaattctatttataacgtgattcccaatacagtcgatttactggcaaagttgccaactgttcaaatcagttcagatagagaaagtatctctgttgtaggcagagggaatcctttaatttatatcgacaatcaaaaagtgggaatgaatgatttgaatgctttggccgtagccgatattaaaacgatcgaaattattcagaacccctcttctaaatatgaggctgaaggacgttctgtaattttgattacaaggaaatttagtaaaaaagacagttttagaactgagattactgaggtcgcttcttttaagaaaaagtacaataattattttggatttaataccagttttaaaaagaacaaactggaatggaaggctaattttaattacaatcaattacagccctgggaaaatcacagtattgattaccaaattcccaatgccgaaatcgcgtctaaatatgatgtgaccgcttattcccaaaaaagacagttcatttttggaggaagtttgttttataagataaatgaagatgattatttttcgtttagtgtgaacagtaagcttcagaaagatatttttcctattcataccttaacttataataagaataaagagatagaaaacaacgtgttgacttacagtgataatgatacccgaaagaattttgtaaactcttttttgaattataataaaaaaataaaagctattgatgcacaggtttttactggtttacagtggtctaattttgatcaggcattgtggagtaatgttaagaataagtataacgaaactccatttgaatgggcacagcttcgcgatcaaaaattcaaggtgactgtcttttcgggtagaattgatgctgaaaagaagtttaaaaatgagatgaaatttgaaatgggaggattgtattcttctgctagttctaaatcagattttgatgtgttatactatgaaaatgatgaaagggaatttagtcaatacgattttaaagagcaaaatttggcaggttacagtcagttttcaggaaaaattaagaaagtcgaattttccgttggagtaagggttgagaatacaaatgtggacgggaaatttaaagcagatttgacgcctctaatccgtaaaaattacactaattttttccctaaagtgcagctttcttttcccatagacagcttaaagagtattagtgttaattatgccaaaagtatctcgagacctaattattcttctttaagtcagggaacaacctatattaatccgtactttttatatgccagaaatattaatttagatcccacgattgtcaacgaaatctcgtctacttttcaataccatgataaatcggttaagctaacgtattatcaaaatacaaatccggtttataatagttttttctttgataaggaactcaatatcatgacttttaaggatgtgaattttgagaaagagtccgccttgattcttgattttgaattgcctttcacctatagattttggactactacaaactcattggtttttgtttcagagaaaattgaagattcttcggccgtattcaggtcttcaaaaccttatttttattattactccaataacgaatttaggcttccagaagattatgtagtagcggttggtttcaggacaattgcaaagcagtacaaaggagtttttgaaagaaatgctagaacggtcgtagatgtaggggtttctaaaacgttctttaaaaattggagctgtgccctaagttttaataatgtgtttaaaagtataacagaagcagaagtttttaccattaacaatatcagttcgaaatccagatatttgattgatgaacatgagatttcagtttctgtaaagtattcttttggaaaagtaaaggaatccgaattcaaaggaaaaaggatggaagagaattcagatcgtataagataaaacagcactgtgaaattgtctttctgagcgaagtttcaaacttaaaatgttctgacttcgctcgatatgacagtatgggcagagcgaggtttacccttcgtcttcttctgttattttagtagaggaatcgtctggcaattcttcgtcatcatcagtggagttcaattcgaagaaactaaagaaagatcctccgtaacttttttgaaaagaaaaattactcaaatgatccattttggtgtatttggaatgctcgataatcatcataccgtcttcgtgaagtaattctctttcgaaaaccgttaccacaattttctcgaatgctgcctgatcaaatccataaggaggatcggcaaaaacaatgtcgtaggaggttttacagttttccagaaatttgtaaacgtcacttttagttgccgcgatgtcaaaatcgtattctgacgaaacctgcttgataaattttacgcatccaaaatcaccgtctactgacgtaattggagcacttccgcgggaggcgaattcaaaactgatgttaccggttcctgaaaacaagtccaaaacctttaaactgtcaaaactaaaatgattgttcaaaacattaaacaatgcttctttactcatgtcggttgttggtcttacaggaaggttttttggcggaaaaatgcggcgtcctttgtatttccctgaaataattctcatgattggaataagatataatgtttttgattttcggctgtggtgaagctatttctttgctgtaaggtgcttacatccaaaaaggatatatgacgaatgtatttatatgcaatggcataaaatgcatcgttttggtcgattgtacctaataattcaagtggaaaactttcaggattcaaacttaattgttcggcagtaaaaagcaaataataaataaagtcttcaggtgtttgatattcaaatgaattgaacaataatagtttttgattttggactacaatcacttcaaaatgaccggggttgaaattaacgaccatttttttatcgtcattgtttcttgaagcgtccagaattttttcgactaaaatactgttggcatgtttgtagtcaaaagtgccgaactgatcgatgaaaaaattgttgatgttaacatacggtatataaaccgcattcatttggtattttgaaatctgatcgtaagcaaaaaaatcagtttcgaaaacttttgtattgtattgcaggtaacttccaaggtagttttcatcaaacaaagccgttggaacaaaagtagaaagattgttattgtgaatcactaaaacttcgtcgtaagtttccgttagttccgggtgatttctaaaagcatctccaaacaattcttcaatcttggtcgttttgtgaaacgtatcgaaatgaatttcttttaaagaagtaaccgtattatttaaagtgtcaaaacaacaaaatgacaatccggtcagagaaacctgaatagaaagctttttgtaattttttgaagtgatgttagtgttttgtaatgacatattgatttacaattcgttacctgtttttcaagaaggaattttaggcgaccacaaacttacaaattaaaaaggaacaataataattgcaatttcaaaaaacaatttcacattcattttaatagaaagttaagaaaagtttttttttgaaaaataaatttggggttctttataaattctgccggggtaaaaattttaaattggcattgccatttaaaaagacgaactttgtatcttaaatttaccctatgaattcagcattgttttacggcgttttgcaaaaaaagtttccatttgcaccaacttataagcaggatattttttttcaaaaaatcgctatttttttaaccgaaccggctaacgacaccatttttgttttgaaaggatatgcaggaacgggaaaaacaactgtgatttcaaccatagtgaacaatttgggggatattaataaaaagtttgtcttgctggcgccaacgggacgtgcagcaaaggtaatcgccagttattcaaatacacccgcatttacgattcataaaaaaatatattttccgaaaaaatcttccggtggaggtgtagcttttaccaaacagctcaataaacataaaaacaccatttttatcgtcgacgaggcctcgatgatttctgataataattccgattcaaaattatacgataacggatcactgttggatgatttgattacctatgtctattcgggaaccaattgtaaaatgattcttttaggagatactgcgcagcttcctcctgtaaatatggatattagcccggctttggatacgcatactttagggattcactatggtaaagaagtcgaacatatcgagctggacgaggtcatgcgtcaggaagaaagttcaggaattttgttcaatgcgacagaactaagagaattgctgaaggaaagttttattaccgaatttaggttcaatgttagaggattcaaagacattgttcgattgacggacgggtatgacattcaggatgctatcaatatggcttacagtaattacagtattgaagataccgcttttattgttcgctcgaataaaagagccaatcagtataacgagcaaatccgaaccagaattttatttaaagaaagtgaactgtcggcaggagatttcttgatggtggttaagaataattatttctggctgaaagaaacagatgaggcaggatttattgccaatggagatattatcgaagttctagagctttttggaatcaaggaattgtacggatttaattttgcaaaggtaaaaatcagaatggtcgattatccggaccaaaagccttttgaaacggtattgattttagataccataaaaagtgaatctccatccttaacctacgaagaatccaatcgtttgtatgaggaagtaatgaaagattatgaaggtgaaagtacaaaatacaagaagtttcagaaagtaaaagaaaacgaatattttaacggtttacaggtgaaattctcctatgcaattacctgtcataaatcgcaaggtggacaatggaataccgtttttattgagcagccgtatttgccaaacggaattgatcgcgattacatcagatggctgtacacggctatgacacgtgctaaaaataagttatatttgatagggtttaaagacgaaagtttcgaggaataaaacacgaatttcactaattgtcacgatttttttagatttagtattggttagatctgtgaaattcgtgttagaaccatttactatgacaacactaaacgacttacattcgatttcgtcttcgttttcgaatactgataaaatgccggttttgtttttgggacacgggagtccgatgaatgcaattgaagaaaatcagtttgtaaccggttttcgggatctcgcaaaaacattgccgcagcccaatgctattttgtgtatttcggctcactggtttaccaatggtaccaaagtaacagcgatgcagatgcccagaacgattcatgatttcggaggatttcctcaagccctttttgaggtgcagtatcctgcaaaaggaagcccggaattagcccacgagactaaaaaaatattagaacccgtgttggtagatttagacgagcactggggactggatcatggtgcctggagtgtaatcaaacacttatatccggaagcgaacgttcctgtgattcagttgagtattgattatacaaagtcgggacaatatcattttgagttggcacaaaaactacaatccttacgccgcaaaggagttttaattattggaagcggaaacattgttcataatttgcgattggtcgatttcaggaactttgataaagacaattacggttacgattgggcaattgaagcgagggaaaccatcaacagtcacttattaaacgataattttcagcctttgattgacttcgaaaaaatgaataaagcgacccaattggcaattcctactcccgagcattatttgccattattatatactttaggattaaaagaaaagtcggaagaacttagtttgtttaatgataaactattagcaggttctttgagcatgacatcggtgaaaataatgtaatgcgattttgtgaatctctgcgaaagggttattgcgcagagatacacaaagatgccacggagattcgctaagattattttctcttcttctaagttatattgatcgaaataacagtcggcgatactcaagtaatttgttgctagatattatataaaaaggtttctcgcagatttaggcagattaaatttggaaaaacctattacgcattctatgatgaaaaatctgctggatctgcaaaatctgcgtgacaaaaattacgcaacatgtaaaaaaaactccgtgaatctctgtggcatctttgtgaatctctgcgaaatcctaatttaggattctttttctaagttatacgcatacagataaccgtcggcacttccgaagtaaactgtattattactaatgaatggcgaagaaacaattgatcccagtttgtacaattcatccattgcttttttattgttttcatatacagaaaggtctgtgtagtgcgcagcgtgaacagaatctaataaatcattttttaagacagaagcagcaaattgcttacggtcctcggtgcttatggttttagatttctttccgttagaaagaaggtctagactaaagaaattgcctgtaaaatcaccaaaataaatagtgcttcctgcaatggccggagaattatagatgtaaccattcgttttgaatcgatatttttctgcaccatttctggcatccagagccagtagggcataagtgtctgaagttcctacataaaccgtattattctgaatcactgcagtacttagaacccaggaattttcggcatcgtatttccaaaccaattttccggtttcggcttcaagagcaaagaagaacggctctctggctccaaaaaagacttttccatcagcaacagctaccgaagattggattcctttaaaacctggttttgttccggttgcaaagcgccagatctccttaccggtttcgatgtttaaggcgtatagaacagcatcccagccgccaacgtaaattttattctgatcgattaccggagttccgtgtacaggtccgttggttttaaacttccattttaaacttcctgttttggcatccagcgaataaacatttccgtcactgctgccgaataacaccactgcttgtttttcttttttgtaaacgacaggggaggacagataaaaactccataaatcttccatgtattgagtttccggcttcagtccaaatatgcctttttctccaaaccaatgttctccaccggttttaaatttccagattaattttccgttttgagtgtttaccgcgtaatagtttccatcaaaacttccaaagaaaacagtattttcaaagaggccgggagtactgtggatggctccgttagttttgaatttccactttgttttgcctgagttttcttcaacagcgtaaagaaaaccatcttcgctgccaatataaacaataccgttttttgtaaccggagaggagaaaattttaccgtcggttttgaatttccatttcaggctggaagtaggctgatacccttgtccgctgaaaatgcgatctgtaaaagcattgtttatagtagattttttttggcagaaggccgagggaataaaagttaagtttaataaaagcaagggcaaaatcaggtgttttttcatagtggttttttctgataaatataatgcattttttaaggggctgttcttcagatttgtaaattacgacaaagaatattttttttaaacttattagttttgaatagttacatttgtttagaagtttataaaagaaaaataaaatgaagattatagctgtaattccggcgcgatatgcatcaacacgttttcctgccaaactaatgcaggatttaggagggaaaaccgtgattttaagaacgtatgaggcaaccgtcgctacaaaattatttgacgatgtatttgtggtgactgattccgatttaatttataatgaaattgtaaatcagggtggaaaagctattaggagtattaaagaacatgaatcgggaagtgatcgaattgcagaagcggttgcgggtcttgatgttgatattgtggtaaatgtgcagggagatgaaccttttactgaagccggacctttagagcaggttttgtctgtgtttaaagacgacagagaacgcaaaatagatctggcatctttaatgcgtgagattaccgatgaaactgaaattaacaatccgaataatgtaaaagtggtggtcgatcagtcgcagtttgcgttgtatttttcgagatcggtaattccgtatccaagagataaagacgttggggtacgttactttcagcacattggaatttatgcttttagaaaacaggctttattggatttttacagtctgccgatgaaatctttagaagcttccgagaaattagagcaattacgttatttagaattcgggaaacgtataaaaatggtagaaaccacccatgtcggaatcggaattgatactgccgaggatttagaaaaagcaagagctattttaaaggatatttgatcggagcaggttaagtgggaagtttgtgaaatgtaaaatgtgagatgtggaacctgaaacctgaaacttcaaacctgaaacttgaaacctgaaactaaaaaaaaactccccaaaagaaatattttcttttggggagtttttgtataatgagctaaattcttagtataaagctggatatttagaagggttaacttcgtgcatcatgctgtagactttttcgaaaatatcttcagcagaaggttttgagaaatagtcaccatcagttccgtaagccggtctgtgctcttttgcagcaagcgtttgcggtttactgtctaaatggtggtaagcatcctgttcttccataatttgctgcaaaataaatgctgaagctccaccaggaacatcttcgtcaattacaagcaaacggttggttttggcgatactttttacgatatccttattgacgtcaaaaggaagaagagactgaatgtcgatcacttcacagtcaatgcctaaatctaacaattcaacagcagcctgctctaccaatcttagagtcgatccgtaagaaacaagcgtaatatctgaaccttcttttaacgtttcaacgacaccaattggtgttttgaattcaccaaagtttaaaggtgttttttcttttaaacggtaaccgttcaagcattcgattactaaagccggttcatcacactctaaaagggtattgtagaatcctgcggcctgagtcatgtttcttggaaccaaaacgtgaataccacgaatggcattaataatcattcccatcggagaacctgaatgccagatgccttctaaacggtgtccgcgggttctgatgattaacggtgctttttgtttacctactgttctgtattgtaatgtcgccaaatcatcactcatgatttggatggcgtatagtaaataatctagatattgaatttcagcaatcggacgcagacctcttaaagccataccaattccctgaccaatgatggtagcttcacggattccgatatcggcaacacgaagttctccgtatttttcctgcataccttctaatccctgatttacgtcaccaatgtttccaacatcctcaccaaaaatcaaagtctccggatatttggtaaacaaggcatcaaagttatcacgtaaaatcattcttccgtccaggtcggctttcgcgtcttcggcgtattttggaagtactttttcaactgaaaatacatttaaatcagaatcagagtataagttactgctgaatcttggttgtgtaatttcaatataattggtaatccagttggataataaaaccttactgtttggtacttcgataaaacgcaatatctttcttgctatggcaagcatttccttttttaaaggcgatttaatagcgcttaattccgaaatatatttttgtattctttctttatgattgatgctggcttcagcaatttgacctaataaagccaaaagatttttctgatcttcaataattggattgatgaaagaattccaagcctcttttttagcttcaagaacctcttttttcaagtcaaaatcaatttcagctaattcttccggagatgcaatgttaatggcaatcatccacaaacgcatttgacggatacagtcaaaatctttttcccaagccagtctctctgcgtttttataacgttcgtgtgaaccagaagtagaatgtccttgcggttgtgttaattcgtttacgtgaatcaaaaccggaatgtgctcttcacgtgcaatagcgcccgctctttcgtaagtagaaaccaattcagcataatcccagcctttaactctgaagatttcataacctttggaatcttcatcacgctggtatccttttaagatctcagagatattttctttggtagtctgatgtctggcgtgaaccgaaattccgtattcatcatcccaaacactcattaccattggaacttgcagaactcctgccgcgtttatagtttcaaagaacaagccttcagatgtactggcatttccaatagttccccaggcaacttcgtttccgtctactgtaaatttatctttaacagtaattccgtcaacatttctgtaaatttttgaagcctgagccaatcctaataaccttggcatttgcccggctgtaggagatatatctgcgcttgaatttttttgttttgttaaatctttccaggagccgtcttcgtttaaactatgtgttacaaagtgtcctcccatttgtcttccggcagacattggatcaaaatctaaatcggtatgaccgtataaaccggcgaaaaactgttttggagtcaattcgccaatagccatcataaaagtctgatcgcggtagtatccggaacgaaaatctccatttttgaaggctttcgccatcgcaagttgcggaacttctttaccgtccccaaatattccaaatttagctttcccagtcaatacctctttacgtcctaaaagactacattcacggctcgtaaccgcaattttatagtcgttcattacttcagttttgaaatcttcgaaagtaagtgtagtattatttttttctttaatcataatctcaaatgggtaatgtttcggagcaaaaataattaaaaagtatcaataatcataattcattaaagtaaatataatttaattatctgtaattaaattgctaaaacagggtgtgttttttaagtgatgtttagtctttttgtttctttagtgcgaataatttatgtttttataactaattcattcgattaaagccattttctagtaaaaagattaagtaatgtttttggtgaaaatgtgacgataaatcgtattttttcactgtatttattttgcgaaatctcccatccgttattagagtaaaccggaaagtacaattcaaaataatccggaactaaatttaatcggataccgctatcatatctgaaattttcgctttgatgcttgcttctcattaaacctaaatctccgtaaacctcaatccagttccagacagcgtagctcgcatttagggtagccatccactgattggcatatcttggtgctattttagatttaaaaccaccttcggctattatatattgctgactgaaaattccggtactttctgatctgccgaaaaaattgtaatcaaacatataatcagacggtcggtctaaaccaaaactaaaataatcagagtttgttcgattgtataaaaaacttccggcgtacaatcttaaatttagttttcgattgttttcaaaaagtcttctgtattcaatttctgcagctacttttccgaattttcctgagaactgaacatccgtcataaaattaaaatgatttaccagttccatttttgtattaacgtaacgggcattaaaaacagaataatttggagtggaattgtctttgatgtaagtgcttgcttcacgatttacaataacctgtctgaacatgatcagttgttttcggttatctctgaaattctcttcacgtattctaaactgtaccatcggattcagtctcaaataggtggcatcaggagcgtagtggtaataattttggcttatggaatagcgtacattatataaggtgctgtttcggtagtattgattccaggaaaatgaggaagaacccgaaaaagttttcgcattaatggaataagccggctcgatatcaaacgtaaaaggtttgtctaaaattgttttgttgtgaagacgcataccgggagtcagaccgtcgtaatagttataattaagagtcggtatgtataaaatttgattgtaataagggtcttcgagatctttggcaaaattaaatttgataggacgattagtaataaccaaactttttatagacctccaattgtttctttggttgtattccggaacctcattgtcatagttgatgacaattttgtcggcattttttctttcaaaaatataggttgaatcggctgttttaggttcaatccattctttaaaaacaacttcatttttattaataccatatataggaatcggagcatagataccggttctgtttttaattcggaaagctacagtgtctttcgttcttgaaacatgggtgaacttataatcgatgatgtcacgtgaacctataatggtattaaagaaccagtcaatcttttttggactttttttggttagtattttttctaaatcgtatcggtttgtctgttccgttttgtttaaatcgtagaattcctgcacactttcgggaacaatattgtgatttaaataatcatctaaatagctaagacttaaacctgctcgatacttactcgcaatttgttcgttaaattttattaaggtattttttggatctcctagcggctgatccagatttttacgggccattagcatgtagtaatagctgtattgctcgttaaaagtaaggcttgtgatgttaaaaccagaaaagagtttcatatcagaaagtcttcccaacattttttgatccaaatgattttcttcgatgtacttcatcatcgcataaatctgaatcccgtcgtaaacccagttgtcttttctagggtccagacgcagactgttttttagataattattcagataagttttcaggaaggttatttcaaaaacaaattcgtctgaaaacggacttataaacgaaggcagctggttgagtccgtagaatggatttcgatcgtaatctacctgagaaaccgtgattttttggtgcggatattttccaataaaagagttagcaaaagtgactactttattgatgataatcgcactctgaatttcggttaatcttttgtttttaagatttgtaagtacctcaagtgatccgttgtcgtaacttttgaagtcattttgtttttcgataaacaggctaaaatcagttctgttttttcccgaaaactggtacgttttaaaggaagagttagtgttgtcttccgaaacctgattcaaatcagtcgttatagcatactggttgggtatttttatttcaagttcataatctgttcttgcattggcaatatcgtccaaattgaaattgtcgtatttcataaaacggtgattctcaaaacgggcaggagttaagaaccagtctttcaaattcattcccccattttgatcaaaaccataacgagtaaatttgtcacttggaattttagtaatataaattaagtgcaagtcaattttttctcccgggcgtaattttttatttagttttactacaatataatcgggatttttttcagttctttcccattcaagtgcggaattgtcggaatcagtaagactcaaaacagttgtgcttcctctttcagaagtttttgccaagtggaaacctctgtaaaattcatcagaaaatcgtctggctaatggtgtgtttttatcagagaaagcattgttccaatcgttaagaacaattgaaatcaaagaatcatttgaagtattataataagtgatatcctgtttgatgttcagggttttgagttcaatgttaacggcgacttccatcttagattgatgttgcgcatattgttttatcgagctgaatagaacaaaaagatagaatataattttataaaatgatttcaaggatagggcaaatgattaaaattataaataaactcacaagtaaataatgattctggttttttgtaaaaatagcataaaaaaagctgtttaaaaaacagcttttaatttttgtagtattttatttaactgaatcatacacagtactatatttgtctcagtttttaacggcttagtacgaaatttaaattctcaaatttgtttaaaagacagatgtctttattagaaatttggactcaaatcgtactttttgtagaatttatccaatacgtcaactacttcgtcttcagtgtctacaattttaaataagttcaaatcttcagggctaaccgtgtgcattttttctaccagtacagttttaacccattcgattaatcctgaccagaattcaactccaactaatataatagggaattttccaatttttttagtttgaatcaaagtgattgcttcgaacatttcgtcaagagttccaaaacctcccggcattaccacaaaaccttgtgaatattttacgaacattacttttctcacaaagaaataatcgaaattaaggtttttatcgtggtcgatataaggattgaaatgttgctcaaaaggcaattcgatgtttagtccaaccgaagtcccacctcctaagtgagctcctttatttccagcttccatgattccgggaccacctcctgtgattactccgtaacctgctttactgattttataagcaattttttcggctaataaatagtatttgtcttctggttttgttcttgccgaaccgaaaatcgatacacatggaccaatacgccccatactttcgtaaccgtttacaaattcagccatgattttaaaaatcgcccagctgtcattcgttctgatttcattccacgttttttgttttaaacgatcctgaattactttatcctcatcattatcaaaatcttctaatctcattttaggtattttataatttatatttttttaaaattgttctctttttagcatggacaaaagagtggtgcctgtttacagattttcgattgaatggtcgtttttctatcaaaaaaagcgctgtcaaaatttgagattttgacaaaaaggctagctaaattaagcctttttttgtgaattggtgcaaaaaataaaatttattaatttaaatatagcatctaaataaaagggcttgataagttgttgttcattatcagtaaattaagacggttttgtggtaattcgttgtcttgtcttaaaaggttttgatttacggataaatatatcgttccgatggaactctcttctgcgatgatttctttatttcaaatgatcgaaatccgttgctataaatatgtcgttccttcggaactctttttgatgtgattttttatttcaacggatttaaattcgttgaaataaaaatataattcctgcggaatttctttttccacgcaagtagagtcatcggctcgatccattttgtagagacggattttaatccgtcctgtaaatcaaacgaaataataaatagaaccgtaggttcggtcaatattatttagttgatttaatttcaaagggagacaaaaatcattgccaaggttttaaaccctggcaatgattttattattctaattcctttttcaaaaatttagcggtatagcttttcttgttttttgctacttcttccggagtacctttggcaattaattgtccgccgccttttccgccttcaggtccaatatctataatataatcggcaagtttaatcacgtccatattgtgttcgatcaccagaattgtatttcctttatcgaccaatttgttgatgacatccatcaaaacgcgaatatcttcaaaatgtaatcctgttgtaggttcgtccagaatataaaaggtgttcccggtatcttttttggataactcaccagccagtttgatgcgttgtgcttctccgccggataatgttgtactttgttgtccgagtgtaatatatcccaatccaacatcctgaatagtttttacttttcgatagattttaggaatgttttcgaaaaagggaacggcctcatcaacggtcatgttcaaaacatctgaaattgattttcctttgtatcgaatctccagtgtttctctgttaaaacgcttgccttgacaggtttcacattctacgtagacatctggtaaaaagttcatttcgatggttcttacaccagagccttcgcaggtttcacagcgtcctccttttacgttaaaactaaaacgccctgccttgtaaccgcgaatcatactttcggaagtcatggtaaacaggtttcggatctctgtaaaaacttccgtataggttgccggattcgaacgtggagttcttccaatcggactttggtcgatatcaattactttgtcgatatgttctaatccctcaatttttttatacggttgtggttttttaacaccattaaaatagtaagcgtttaatataggatagagtgtttcgttaatcaaagttgattttccactccctgaaacacctgtcacgcaaatcaattgtcctaaaggcaattcgatagaaacattttttaggttgtttcctgttgctcctgttagttttagtgatttaccatttcctttacgacgttccttcggaatctcgagtttcattttgccgttcaggtattgagcagtaatggtgttggattttaaggtttctgcgggagttccgatactgatgatttcaccaccatattttccggcttttgggccaatgtcaatcacataatcggcagtttcgatcatgtctttatcatgttccaccacaataaccgagttcccgatatcgcgtaattgttctagagatttaatcaatttttcattatctctttgatgtaaaccaatactaggttcatccagaatatataaaacaccaaccagttgtgatccaatttgagtcgccagacgaatacgctgcgcttcgcctcccgaaagtgattttgaacttcggcttaaagccagataattcaagccaacattcatcaggaagtttaagcggtccttgatttctttaactacctctgaagcaatcaaaagttgtttgtcagtcagatgcgtatgtaaatccaggaaccaggtcgtcaaatcagaaatatccatatcacacaaatcggtgatgtttttatcgttgattttgaaaaacaaagcttcttttttcagacgggaaccttcacaaacgggacaattaacttcgtccatgaaatctttcgcccaacgtttgatagtggtggaggcactttcgtcatactgatttttgatgaaatgagaaattccttcaaaatctattttataatcacgggttacaccaaggtctttagaatttacagtgaatttctcttttccgccatgtaggattgtattcatggcttcttccgaaattttctcaataggatccgttattttaaaaccatacttttcaccaataacttctaattgtttaaatatccaggaagatttgtattcgccaagcggagcaaaacctcccgctttaatagataattttggattaggaatgatttttttgacattgatttcgtgtaccgttcctaaaccgttacaatgtggacaagctcctttcggagagttgaaggagaataaattaggttctggattttgatacgaaatacccgtcgaagggcacatcaggtttctactgaaataacgtacttcattagtatcctgatccaaaatcatcaaaacgttttctccatgatgcatcgctgtattgatgctttcagaaagacgtttctgattgtcttctgtattttcaatcagcattctgtcgactacaatttcaatatcgtgcgttttgtaacggtcaagtttcattccggaaaccaagtcctgaacttcaccattgacacgtacttttagaaaaccttgtttggtaatttgctggaacaactccgcataatgaccttttctggccttaattacaggagctaatatattgatgcgttttccgttaaaatcctgtatgattaaatctttgatttgctcgtcagaataagaaaccattttttctcccgtattgtagctgtatgcgtcggcacctctagcgtaaagaagtcttaggaaatcgtagatttcggtaatagttccaacagttgaacgtggacttttactggttgttttttgttcaattgcaattacgggtgaaagtccgtcgattttatctacatcgggacgctccaggcctccaaggaactgtctggcataagccgaaaaagtttctacatagcgacgctgtccttcggcataaatagtatcaaatgccaaagatgattttcccgagcccgacagaccggtaataactaccagtttttcacgcggaattgaaatgtctatattttttagattatgaactcttgcaccaagaacttcaatagtattgtctttttctaacataaatttgagcaaaaggcaaagttaccactttgatttgttctttttatactggattgtaaaagtttatgttacaaatagtaacaaaaaacgctaaccaaagttagcgttttcttttgcgtgtaagcatatattcttcgatggcttctttagtagtgtaccagtttcggccttctttataagcatctattttacctgttctggcaagtaaacttacatattcctgaccgtatggggtttcaggttcgcttacaatatcagatattttttgataatcataatcactgcccggcattgcatttagatagatatttaaagttcgttctaaagcctgacacatcaaaagggttaatttttgataattaccattgtttgcctgattgagggcctcgtaatatttctttcggtcattttttaggataatagccggaggaaagccgcaacgcattagcaataaattcatacttaagcgcactgtacgaccatttccatcaaaaaaaggatgaatccagaccaacttatggtgataaatcgtagccagttcaatatcgttgagatctaatggatttgtattgatgaaatcaattaattcatcaagataatctgaaactttgttggcattgggcggcataaaatttgctcccgaaattcgaactccgccattgcgcaaacgaccggcaaaatcatcttcaatagaacgcaaaactaatccgtgaatcgacaagatgtcaatgcttcggagtttgtaggtatcgtctataatttcatacagataatcaatcgccttatcatgattgtgggtttcaaaatgttcccgaagcgattttcctttgatggtgataccttcctgaatgaccatttgggtttcgcgtaagctcatcgtgttaccttcgatgctgttcgaattgtaggtccattctaaagataaactctctctgattttatgcaaagcaatgttgggcagtggtctgctgttctgcagatcgagccttttttgatacaatcgatcaaaggtagattgaaattcagttctatatgttaagtctatatcccacattacccaacaaaagtacttcttattatcggataataaaaatttttaacctatccgatattaagactactcaattgtcatagaacgcaatttggttctataggcttcaagtgctattgatttggaaatgaatccatagtatttttcgttacggagaacgggaagaaaggctgttttggattgttcgaatttactcattacaatttccatactgtcagaagaagaaatagtaactagaggtgttttcattacatctttaatggcggtatatttgacgcgataagcattaaaaataatttcacggatatcattaaaatgaacaataccaacgagttctttctcattgtttaccacagcgaagaccacttggttggagtgtgagataagatcgacaagtttgcctaaattttcatccggatgcaccgttaggtaatcgcattggatgatcgtatcaatatctaaagtcgataatatattggaatctttattacttgtaaaagcgtgcccttttttagctaagcccttaacgtctaaagaatatttttcaaaacgttttgaaatagcaaaactgattgaagatacaatcattagcgggatcattaagctgtaaccgcctgtaatttcggcaattaagaaaatggcggtcagtggagcatgaaacaatccgcttaagattccggccattccaaccatcgtaaaattactaataggaagttttgacagaccaattaggctaatgaacttcgagaaaaagtaccccaaataggatcccaggaatagagagggagcaaagttaccaccatttccgccacttccgagggtaagtgccgaggcaaaaactttgaccatcatggtgcatcctacaaacaacagtaaaacccattgattgtttctgaaatcttcaaacaaagtattgtttaatatttttcccggatcagtttcagatagcgttttgatactctcgtaaccctcaccaaataatgttggaaaaataaaaataagtaaggccaatagcgaagagcctattaaggcttttttataggctcctatttttagactggcaaaataatgttcaattttttgaaaatttcgggcataataaacggccatgaaaccggttagtattcctaaaagaacataaaacggaatattgtgataattaaatgcttcctgttttttgaaagatagtaaaatggtttcgtctaagacaatagctgaaactaaagcgcctgtcgcggccgaaatcataataggagtaaaggcagaaatgcttacgtctaccagtaaaacttcgatggcaaaaagaactcctgcaataggagcgttaaaagccgcggcaattccggcagcaacaccacagccaatcagcaaagtcctatccttataagggagtctgtaattttgggcgaaattcgatccaaaagcagctcctgtaatcacaataggactctccaaacctgcagaacctcccaggccaaccgttaacgaactggtaacgatttgtgcatacatttgttttctgggaattatacttgctttttttgcaacggcatataatatttgtgaagttcctttttcgatgctcccgttcaaaacccttttgatcacaaatacggtaagtacaataccgataatcggcaggatactattaataaagctcagttttaaaattccgttgatataagtggcaaatgaaaaaacactatgggcaaaagtttttaaaacaattaccgccaaagagcaggaaataccaattaaaacgcttgacaggaaaataaattgctttggagtcattaacgattgtcctaaagcgataatgctttctagttttctaaaatatttttttagcatgccgtttgtaaatggttagggaaatacaaatttagtctataatgttataaataaataaaaataaagaactaaattaaaaacctactgctgtatcgtctccacgaaaatcagccccgccttcaagagaattgtccggaagaaccaaaatacaatccagcttaccaattacaggagcatttttttcattgatcagatatccttttgcttttagcttatcaattgtaacgttgctaaaggcaccaggttcaaatgtaataagatccggaagccactgatggtgaaaacgtggagcattcactgcttcctgcatgcttaaattatactcataaacattcaaaattgcctgtaataccgaagtgataatagtcgatccgcccggagtacctaccaccataaacagtttaccgtttttttcgacaattgttggagtcattgagctcagcattcttttttgaggtgcaatactgttggcttcatttcctactaaaccaaacatattgggagatcccggttttgcactaaaatcgtccatctcattgtttaaaaagaaacctaattcatcgcagtagtattttgatccaaaggcatcatttatggttgtagtagcagcaacggcatttccttgtgcatccacgatcgaataatgcgtcgtttcggtactctcattgtacgttacttttccttctttaatttcagaagataaactcgccttttcagcattgaaactcgacattctgtcttttaaataggcatcagacaataaagcattcatcggaatttttacaaaatccggatcgcctaaaaactgacttctgtccgcataagctcttcgttcagcttcaacgattacctgaatagattccggagtgttgtgccccattttggataaataaaaaggacttatcattttcataatttgagccagacaaattccgccactgcttggtggggccatagaggttattttcagttctttataatcaaactgtaatggttttctccatttggcttcgtatttttctaaatctttaagggttatgattcctccttttttctgtatataatttactaaagttttagcagtctgacctttgtaaaattcatcttttccgttcttttgaatacgcttcagagtgctggccaaagcagggtatttaatggtatcattttctttaaattttcctgccataagggtattcgggccatttacttttacaatagcgtcgtgataagcctccagttgcttttgctgttttagggttacgatcacgcctttttcggcaagggcaataacaggttttaaaatttcggacatcggcagagatcctaatttcttatgaaccgcaaaaactccggcaacagttcccggaacaccaatagccaaagccgtttcggtactttttcctttaatgacatttccgtctttatcaaggaacatgtcttttgttgctgccagtggtgctttttcacgataatccaatgatccaacttcgccattagcttttcggtaaaccataaaaccgccgccgccaatatttcctgcatacggaaaagcaacagccagtgccagttcggtacccaccattgcgtcaaaagcattaccgccttttttcatgatatctgctccaactttagaagcttctgcacgtgccgaaaccaccatcgctttcgaaactacaagtccggttggctttattgggttttgctgtgcagtacagctaatatagattagcgtaaataagaaagttatttttttcatgttgatgtaaaattaaaaggtattatttggtgcttttgtttggtaaaaagcagtattaaagagaaagtaatttttgattggcctggcttttcatatcctcaaagaagagcgtgaactcacgttcaaattcaggatagaattcctttagttcagcagtagcaaattgcatgttggattggttttttgatctccttcggtccatctgagttaaaatctgatggatcccttcaatagtctgataactcaaaagccagttttgtttgatcatatacggcatcatatcttgtgttttttcagtcaggataggatagtttccatgcagcgatctgtaaaatcggttcacaaaacgatctagtttttcgtcggaatatttttcccagtttttggctaaaaaatgatcgtagacaatatcgacaattacgcctgcataatgatggtatttctcatgtaaacgtttggtgctctgtctgaaaatatcatgagaatcagtataagtgtctataaaacgatgcaaaagaattcctttttgaacatcttccggaaaatgttcaaactgtttaccgcgaattccatcggccataaagttgccaattttaatcaaatcattttcacctgaaagatagatatgagctaggaaattcatgtgtttttaaagtttgtgaggttcttacttgtgaagacagtgcgtaattttagtaaaagtataaaaactttttgacatcgttttaatgaatgacagatagcttcatgtttaaaatctgaaaacttagaatcttagaaacttagaatcttagaaacttttctatatttgtgataaaaaaataaccataactcacaaaaatgactttaataaaatcaatttcaggaatacgagggacaatcggtggaaaagtaggagataacctgactcctgttgatgctgtaaaatttgcatcggcatacggtacttttttgaaaaacaacacctcaaaagaaaaattaacagtggtgattggtcgtgacgcgagaatttcaggaccaatgattcacaatcttgtagtaaatacgctaattggtttaggaattaatgtaattgatttaggactttctacaacaccaacagtagaagtagcggttccgttagaaaaatcagacggaggaattattttaacggcttctcacaatccgaaacaatggaacgctctgaaattgttgaacgcaaaaggtgagtttttaagcggagaagaaggtgcgaaaattcttgaaatcgcagaagcagaggcttttgatttctcagatgttgacagtttgggtgagattacgataaacgatgcttatatggatattcatatcgacgaggttttgaacttgcctttggttgatgttgaagctgtaaaagcggctaaatttaaagtggtagtagatggtgtaaactcttcaggaggaattatcattccaaaattattggaacaaatgggtgtggaggtcgtaaaattatactgtgaaccaaacggacactttcctcacaatccggaaccattaaaagaacatttaacggatatttcggaattggtagtaaaagaaaaagcgcatttaggagtagttgttgatccggacgttgatcgtctggcttttatctctgaagacggggaaatgtttggggaagaatatactttggtagcctgcgctgattatgtgttgagtaaaactcccggaaatacagtttcaaatatgtcatcgtcacgtgctttgcgcgacgtaactgttgcacatggtgggaaatacgaagcaagtgctgtaggtgaagtaaacgtggtagcgttaatgaagaaaaacaatgctattattggaggtgaaggtaacggtggaattatttatccggaatctcattatggaagagatagtttggtgggagttgctttatttttaacccatttggcaaataaaaatatgtcagtttcggcattgcgtgcttcttacccggagtattatatgagtaaaaataaaattgaattaacaccacaaatcgatgttgatgcaattttagaagccatgaccgaaaaatacaaaaatgaagatatcagtacaattgatggtgtgaaaattgattttgctactgaatgggttcatttaagaaaatcaaacaccgagccaatcatcaggatttatacagaagctccttctcaggaaaaagccgatgttttagcacttcgaattattgatgaaataaaagcgatcgcaggaatttaatgtgcattcttataacaaacaaaaaacacctttttcatattgaaaaaggtgttttcttattttaaagactcaaaagtgaaaagtgaaaaagtattttaggtttgaacatcaaaaactcacaattcacattttacatcacacatttcataaaaaaattactctatcctgtgtttccatcttttgtgcgtccacaaatagaattcaggagcctcataaatttgtttttctacttctcttaagtatttctccgtgatgtcaaaatttttataatcatttggattgtcggcgatcggtacaaaggtggcttcgtaatagcctctggccactttttttacttttacaaaaataacactcagatcgtatttcttggccagcatttcggctccggtgtgcacgggaacttcaattcccataaatttcatcgaatgaaaaattcgatccagtttaggcgattggtcgctggctaaaccgtacatgcttaaaattccgttacgctggttttgagccattgttggaatcgcttttctagtttcaaccaattcagtgtcgtatttagaacgtatttttcgaaccaatttatcaaagtaggggttggccacttttttatagaccgctataccctgaaaagcaattttagtattcatagttaaaagccattcataactggcgtaatgtgcagctaccagaatggtgcttttaccttttttcgcatattcgtttacaatctcaatattcgtagtcttaaatcttctttccatttcttcaggtgaaatgctcatcgttttgatcatttccagaaacatgtcacacatgtggctatagaatttcttttcgatttcttttcgctcagcatcgtttaaatgtggtaaagtaagttttaagttttcacgtactacctttttgcggtagcctacgattcggtaaatcagaaaacaaacaaaatcagaaaaccagtaaaatattcggaatgggagaatagagataagccatagaaaagggtaggctatgatataaacgagaaattgcatgtattgtttttttacaaatataaagcaaaaatgaattacgatcgatattttggattgatgctaacatatgtttaagaatgactatatttacaattcacattaaaagttttttatgaataccattttgattggaattatagttgccaatgttttgattagttatcagggtttcaacaatcttgctttttttagaaaatatgagtttcatgtaggaagtattcgctcgggagaacaaataagaatgctttcatctggttttttacacgccgatatgatgcatttgctttttaatatgcttacgctttggttttttgctccggtggtattgcagtggttggggaatttttcttttctgttaatttatttcggaagtttaattttcggaagcttattaacgatgctgtttcataaaaacgattatagttaccgtgcagtaggggcatcgggtgcagtgacaggagttttatactcggccatattgttacagccggatatgatgttgggaatcttttttgtcataccaatgccggcctatttatttggaattttatatttattgtattcgatatacggaatgaaggctaaaaatgataatattggacatacagcacattttggaggtgctattggcggatatttcataactttgatcaaagagccttccttatttgtagatcatagtttaatggtaatattgttggcaatcccaattttaatccttttcgttatggctaaattggggaaattgtaacaatggcacaacttttgaaaggtcactaatcaaataatttaaatataataaaaatgaagaaagtagtattatttttaaccatcatgtttatgtctatgtcttacgcacaagaagtcaaacaaattcctcaaatcaatgtaagtggtgaaggaaaagtaaaaatagcaccagatcaggtttgtatttcagctacggtggaaacaaaagggaataatgctaaagatgtcaaaaaacaaaacgacgaaaaaattgacgctgttttgaaatttattaaaaaaatgaatgttcctgttgctgattacaaaacgaaacaagtttcgcttaatccgcaatacgattacgaaaaaaagaaaacaagttataatgctactcagactgtagaaattgtattgaaagatttatctaagtacgatgaagtaatggaaggtttggtacaacaaggaatcaatcgtatcgataatgtttcttttgaatcttctaagttagcacaacaccaatcagaagcccgtaaattagcgattaaagatgctaaagcaaaagcggaagactacgtttcagttttagggcaaaaagttggtaaagcgattacaatctcagacaattctcaagtatacaatccaagaccaatgtatgcagctatgaaatcaatggctatggatgctaacggtggtgctgaacatgaaacgcttgcggttggagaaattgaaattacagcaaacgtaaatgtaagtttcgttttagattaaatatagaaaaaaacattttttcaaatcccaaattccaatttaaaactggagtttgggattttttgttttaactactcttagggacgataataagatattttttcgatgccgggaggtttataattaaaaaaaagttttacggaaaaggaagcattgcacaacctaacacatgcacctatttaacattcttcatcgctctgaaagagcctttgcaatagcatagtgatttttacaataccgatggttttgcaattttaaagaatttctagaggttaaggaagtaaggcgtaacctaacacatgcacctaatttaacattattcatcgctctgaaagagccttagtaatagcatagtgatttttacaataccgatggttttgcaattttaaagaatctctagaggttaaggaagtaaggcctaacctaacacatgcacctatttaacattcttcatcgctctgaaagagcctttgcaatagcatagtgcgaagcactaagaaagggatattgataaggattgttttagccctgaaagggcaaaagcctaatctcaaagaagagaaattgatttatattatgttttcgaaagagatttttaataaaaaaaatgtttgctctagccctttcaggacgcaccagtccttgctttaattcagagtgcttcgcaccatgttaatgcttttgggtttttagcccttttttagggctattttcagcttttttctgtgcctcaaaatactaagggaactctgttcgtgtttttacataaaagagatttttctctacctatagttgtaatgaaggtgcatccgcaaaatttgctttcaattcttcaggtaaataaggtcggcctccggttgccggaatacaagtgcctgtaaatactgccgtagccattattttcccattttttataatcgattgtttgaaatgcaaacgcggtaatccctgagcatcggtataaacagcacaggtgacatcaaaattatcgtctttttttagcgagcggataaatttgatactgtattcggataaaaccataaatacgccattttgggcctgttgcacaaaatcaaaacctaaaacctcccgaacaaagtcatgacggcattcttccatataaaaagggtagtacaaaccgtccataatgccttgtatgtctatatgtgcgtccgcagcagtgtaattttttgaatattccataatgtaattaaagttagaactatttgaacgtattttcttattttatatttattattatttgtaagattataccaattgttaacattacaacagattttagttacgactaaaaacaaatagcggtaggtaaaaatataaaaatgctttatttttacactatcaattattaaaaacaaaacaaacagaaatggattggattacagccagagaatttgaagatataacttataaaaaatgtaatggagttgcgagaattgcttttaacagaccaaacgttagaaatgcattccgtccaaaaacaacttcagaattgtaccaggctttttacgatgcgcaggaagatacttcgataggagtggttttactgtctgcagaaggaccttcaaccaaagacggagtatattctttttgcagcggaggcgatcaaaacgcgcgtgggcatcagggttatgtgggtgaagacggacaacatcgcttaaatattcttgaagtgcagcgtttaatccgttttatgccaaaagtggttattgcagttgttccgggttgggcagttggcggtggacacagtttgcatgtcgtttgtgacatgactttggcgagtaaagagcatgccatattcaaacaaacggatgccgatgtaaccagttttgacggtggctacggatctgcgtatctggctaaaatggtcggacagaaaaaagcgcgtgaaattttctttttaggtagaaattattctgctcaggaagctatggatatgggtatggtgaatgctgtaattccacatgatgagcttgaagatactgcttacgagtgggcacaggaaattttacaaaaatctccaacttctatcaagatgctaaaatttgcaatgaacttaacagacgacggtatggtaggtcagcaggtttttgccggagaagcaacacgtttagcgtacatgaccgaagaagcaaaagaaggaagaaatgcctttttagagaaaagaaagccaaacttcggtgagaataaatggttgccataagactatctgagattttagattgcagattttagatttttgaatctgaaactgggagctaaatttgagattaaatcctaaattatataatacaatttagaggatagactttagagtattgcaattcaaattaagaatgcaacaatctaaaatctaaaatctaaaatctaaaattaaaacagaatgaaacattggattgaagccgctcgtttgcgtacattgcctttatcagtttccggaatcatagtaggaagtatatatgccttatcaaacccaacggaaaccattaatacaccaacagaggtattcagttggaaaatttttggttttgcactattaacgacgcttggattgcaggttttatccaattttgcaaatgattacggcgatggtgtaaaaggtactgacaatgcggacagggttggaccacaaagagctattcagagtggtgttattacacctcaggccatgaaaaaagccattataattacttcatttctgaccttgttgtctgcaattgtattgatctattttgcttttggagaaagtaattttggatattccatctttttcttattgcttggaatagcagcaattgtttcggcaattcgttataccgttggaaattcagcttacggatacagaggatttggagatttgttcgtttttattttctttggattggttagtacattgggagtaaactttttgtattcaaaagaagtcgatccgcttttgatcttaccggccatttcaatcggtttattaagtgttggagttttaaacctgaacaatatgcgtgatgaagaatcagatcgaaaatcaggaaaaaataccattgtagttcagattggtggtgcaaaagctaaaatttatcatttcactttgattattacggctatgcttttagtggttacttttgcctttttgagtgattataacttcgatcagtatttgtttttattggcttttgttcctttaactaagcatttaattaccgtttataaaaaccaaaatccaaagttgttagatcctgaattgaagaaactggcactaagcacctttttactttcaatattactgacggtatgtatgatttcattgatttcagacattattgtaaacctctttttagggggaagataaaacaaagttcaattttaaaaatgaattaaaatgaaaataacattttacggacatgcatctttaggtattgaagtgggtggaaaacaaattattgtagatccttttattacaggaaatccacaagcagcaggagttgatatcaacagcttagaagcagattatattttacttactcatgcgcatggtgatcatattctggatgttgaagctattgccaatcgtaccaaagcggtgatcgtttcaaatgctgaaattgcaggttattatgctaaatttggtttcagctcacacccgatgaatcacggtggaagctggcaatttgattttggaaaagtgaaatatgtcaatgcgattcattcaagctctttccctgatggaagttatggtggaaatccgggtgggtttgtaatcgaaggcgaacataaaaacatttacattgccggcgatactgcactgactatggatatgaaactgattccaatgagaaccaaattggatctggccattcttccaatcggtaataattttacaatggatgttgaagatgccatcatagcctcagattttgtagaatgcgataagatccttggatatcattttgatacttttggttacattaaaatagatcatgaagacgctattcgcaagttcttcgataaaggaaaagatctgatgcttttggaaattggcgagtcaattgaactgtaataaaatgtcagatattaaatttatttgtgaatgctgtggcgaagagcatgtaagctggcctgcaattgcttacagttcaccttctgcttacaacaagctttcggaacaggaaaaagaagaaattgcagttattgaccaggatttttgtgtcattaaacatgaagatcatatcaatcgctttataagagtggttttggttcagcaagtgaacgatcattgcgaagatttagagtatggcttctgggtttcacttagtgaaaaaagttttgaagactatctggaaaatggcgaagatgaaaatcacaaggcgcagtatttcggatggctttccaattacattccggattacgaattttcgaacagtattccgacaacagtagtgactaaacctggtaatgaaagacctgaaatttttccacaccaggatttcgatcatccttttgtgaaagatttttataacggtattacaaaagctgaagcggagaaaagaatttacagaatattaaataataaggcctgaattttgtaagtgatcttaaaataaattttctacaatgattttaaaaaaaaatgccctgtttcttttaattacaacttcgtgcagcatttttgcgcagaaagacggttattgggataaagaacgtgctactacaaaagaaattatagtttctgcccgtgaccgaattatgcttaaaacagaagatttacccgtaggaacaacagaaattgtataccgaatcacgcttctggatgaaaatcaggaaatggcaaacagtctggtctccgttctaaaatcaattccggatccaactggaatcagtcagggatcggccggagcagtttttctgatgtctaaaatttcaggagatgatacctgtacctatgctttgtttacctccaacgaaacagcaaaaaagtatatcactgatggtaaaacggataaagcctgttacgatcagaaagatcccttaagcaaagacgctaaacgattatcgctggataaatcgtcctgtctgggtcagaatgtaaatacactttggtttggttttcacagcaaaaactggcttttaaatcaaaaaatagttttggaagtggtgccgtgggtagacacaaaattaaatcgtggatggaatcaggacaataaaaatgaaattataagcctttgtaaaacctccacaatggctcagaaaatggcaaattctgatgatttttgtgtttgcatactcgataaaatcatgaaacaatatcgttatacggagtttcaaaagttactgccaattgaaaagagtaaagtttataaggattttggaaatagctgttataaagatgctgatatttctaaaaatgtttataacgacctaagaacacaagtggctgctttagtcagacttcataaatacaacgaagcaattccgaaactgaatactattattaacgacggaaaagcaacggctttggattacagttcgataggatattgctatattttgaccaaacaatacgctaaagccattaaatttctgaaagaaggtgaaaagttggacgatacggagttgcttgtcaaattaaatctggcacacgtttatctgattagtgatgattatagcgaagcgaaagccatttataaaaaataccagtcgcaaaacgtaacagacagtttaagctggatagagaaaacaaaacaggatttcgtaatttttcaaaaagcaggattaccctcaaaagattttgaaaaaatattgaaactgtacaattaaaaaaaaacataaaatcaataataagcctgtttaatggtatgacacctacttattcaggtttatttttttaccatctatttattatatgaaagcaaccttccataaatacatgcttgattttaaaaggccttccgggacttcaaggggggttatgaccgagaaggaaacctggtttattattctggaagagaacggtaaaaaaggaataggagagtgtggaatacttcgtggtttgagtgcggatgatcgcgaagattatgaagaaaaactgcagtggacgtgtgataatattcatttaggagaaaaggcgctttgggatgctttgttagaatttccatcgatacaatttggtgttgaaatggcatttttatcctttaaaagtgaagatccttttgttttgtttccgtccgattttaccagtaatgtagagtcaattgtgataaatggtctagtttggatgggggagtcttcctttatgaaagaacaaatcgaagagaaattagccaccggttttaattgtataaaattgaaaataggagcgatcaatttcgaaaaggaattggagttattggcttttattcgcagtcatttttcagcagagcaaattgaaatcagggtagatgctaatggcgcttttactttaaatgaagcattaggtaaattgaatcaattgaataaatatcagttgcatagcattgaacagcctataaagaaaggaaacattgccgcaatggcggatttgtgtaaaaccacaccgtttccaattgctctcgatgaagaattgattggtattttttcattggaagaaaaggaggctttactgcaaaaaatacaaccacaatacattattctaaaacctagttttgttggtggcttcaaaggcacaaaagaatggatagatttggccgataaatatcaaataggatggtggattacttcagcattggaaagtaacataggtcttaatgcgatcgcacaatggacatttttgcaaaactcaaaaatgtctcagggtcttggaaccggagcactttacacgaataattttgattgtccgcttgaagttgtgggggggcagttatggtacagtaaaacaaaagactgggatttcgattttctcagcagcttataaaaaaaactggcttaaagccagtttttagggttatattgatttcggttttattcttttccgccttttagactgtcctgccagtcttttaattcctgccatttgccctggtaagcaagtaatgcctgtctggcccaggtgcttggattgtggatagcataattttcacctccgccatccagaatggattgtaatttttcggttgaagcttctgacagttcgtgccatgttttaattccagcagcgttaaataacgcttcaatttttggcccgataccttcgactatttttaaatcattttctttaatttttttgccgtaagcggtcgctgctaatgcactgtcaaaaggtattgcaggtatcgctgctgctgcgaaagattgtggagcgttattaactttagcttttgcggccaattcagcttccagagaagaaattttagcattcaggtttcgtgtattggctttgcaggcatccaaatcggcctgtagtgacaaagcaagtgaatcgtcacctttagaattcatttttcccagtaagtaacccaaaattccacagattaatcccactagagccggtattaagatacaaggtatattcatgatcgtatattttgattgattatttaattgttattactgttcttctgttggttgccctaccttcggcagtggtgttctcaccaataggctcgtcaggaccttttgattctgctgttatccgatttccgtcaacaccatttttcgacaaataatttttagtaaactcagctcgtttttgaccaagagacacattagaatcacggtttccaacattatcactatgcccaacagccacaattaccgcttctttcacatgttccatatatttcactagatcggcaactttttctttttctgcaggagttaacttatcactggatttattggtactgaaatgtaaaataagtggatcaccattgattttctctttcagaataatccattcatcggttacagccggagcggcttccggagcttcaaaagcatatttgacaggtccaaaaagtgtatcttttttcgtttgccatttatcaatcacttcaccctttgtgtttaactgcgcatcaggtaaaccttgcgacacaaaatattttttaatgtcattagcccgtgcgaggccaagattttcaaaagttgtcgtattgatttcatctgaagtagcataacctgttagggtaattttttgctttggattagcgatcaggaatgttttaaggttttgaactccaatcgataccgaatcacccacaggcaaaagtgctgttggactatttttaaggaacttgatattatcattggtgtgataatcaattccggaaccatttagaataaaagggacaatagtttcgtccggagccactacttttgatactttcccggtatcaatcgcaggtgttttcatagtgcaattgcagcaaaatttcaaatacaaaaaggtacctaaaataatggttattacaatgcctaacagataaagtgcttttttagacataggtgatgaagttaagattctatcaaatttaacaaaaaaataaatacataacctattaaaaatcagttattttaaagttattattcttattgtgagtatgttacaaaaatgaaatttaatgtctaccaatgattcttgtgatttcaattcttaggccaaattaaattgagtaacttgcataaaaattaaattcagacatcaaaatggtcgaaatagaaagaaagtttctggtaaaatcagctgattttaaagaacaggcttttacgcacaataaaattgcccaaggctatttaagtgcagttccggaaagaacagttcgtgtgcgtatcaaaggcgaaagaggttttattaccataaaaggagtcagtcagcagggcggaatgtcccgctttgaatgggagaatgaaattccgcttgatgaagcattggaattgcttaagttatgtgaaaaaggaaaaatcgagaaaacacgttacgaagtaaaattaggaaaacatatttttgaagtagacgaattttacggtgaaaatgaaggactggtgatggcagaagtagagttggaatcggaaacagaaattttcgagaagccggattggctgggtgaagaagtaacaaatgacccaagatattataacgcttatttgagtaagaatccttttaaagagtgggagaagtaaaaaatatgaatacatatgatttgattattgtagggggcggaccaattggtctggcttgtgcaattgaagcccaaaagaaaggtttgcgttatttgataattgaaaaaggagctatagtcaatagtatattcaactatcctttgtatatgacttttttctccactgcggaaagacttgaaataggaaacataccgttcagttgtcttgccccaaaacctggtcgtcaggaagcattggagtattatcgtaatattcatcggtattttaatttttccattcatttatttgaaagagtacttcaggtagaaaaactcttaaatactacttttaaaattacaaccgataaagcactttatgaagccgccaatgtgataattgcaaccggtttttatgatattccgattgaaatggaagtgaaaggagaagaattgcctaaagtccgtcattattataaggaagcccatgaatatgctttcaggaatgttttggtggtaggagcaaacaattcttcagtagatgcggctttggaatgttggagaaaaggagccaatgtaaccatggtcattcggaaaaaggaaatcaacagtcgggtaaaatattgggcaaaacccgatattgaaaaccgaattgcggaaggcagcattaaagcttatttcgaatcaaatattactgaaatcagggggactgaagtagaaatagaaactcctatggggaaaattactattgaaaatgattttgtactggccctaaccggatacaaacctgatttggcttttctggaaaatatgggaatacaattatcagaagatgaattaaaaacccctacatacaaccccgaaactatggaaaccaatgtggaaggtttattcttagcgggtgtaatttgcggaggaatgcatacgcacaaatggtttatcgaaaattctcgtgtgcatgcgaacatgattgtagattatattacttcgaaataagtttatagccacgaattcacgaattaaaacttcgcaaagtttataaaaaattaaaattcgtgaattcgtggctaaaaaattaagaactgcaagaaagcatagaacacccaacttttgaacgggcccaatccgggcgtttggcaaaccatttttatgtgaaagatttattcttagcagggggtaacttttggaggcatgcatacgcacaaatggtttatcgaaaattctcgtgtgcatgcaagcatgattgtggattgtattatttcgaaataagtttatagccacgaattcacgaattaaaacttcattaagtttaacctgttgcttaaaattaaattttatgcaatttcacccaacggattaagtttataaaactaaaattcgtgaattcgtggctaaagaaactaagaactacaggaaagcattgaacacccaacttttgaacgggcccaatccgggcgtttggcaaaccatttttgaaattccggttgttcgtcatacggtttttgcagaagttgatacagttcatcaattaaggaataatcttcctgatctgcggcatcaatggccagttgggacatataatttcgaagtacgtactttggatttatagcattcattttttcagaacggtctttatcagaaagcgtttccgtatgaagtctttcgagataaagagtaaaccatttttgccatgattctaaaattgtatctgagatttgttccggaatataaaacgaatcctgaattctttcgattgctttttcaggagaatcggatttttgtacactgcttaaatttcggaaaaagatcgtcatgtctgtttcagagagttgtaaaacggtttccaaaccgtcaactaacgcattatcagtttcggttgaaataagcaagcctaatttgcttaaaaacatattcttataatcagattcaaaatcaatcataaaagactccagaattttttctagaggttctgcttcattgattaaagggaaaatggcattggccaattggtacaaattccattgcgcaatctgcggttgatttccaaaacgatatcttcggtattggctgtcggtggtgtttggagtccagtttgggtcgtaattttccagccagccataaggaccataatcaatcgtaattccgtgaattgacatgttgtcggtattcattactccgtgtacaaaacccacacgctgccaatgcagaatcatttcgcgggttttatcagctactgttttaaaaaattgtaggtattgctctttaggctctccttttatttccgggaagtagtatttaatgttgtacgttacaaactgttttaaattttgaagctcatttcgggcggtcagcatctcaaaacttccaaaacgaataaaggaaggagcgacgcgacaaacaattgcacctttttcataagcggcatttccattgtataacatatcacgtaaaacttgatctccggacagcataagggataacgatcgggtagtgggaactcctaaatgatgcatggcttcggcacataaatactctcttacagacgaacgcaaaacagccaggccgtcagcagttcgggagtacggagttcttccggcaccttttaattgaagcataaaagattcatcattatgtgtcacttcagttaaattaatggcacggccgtcacccaattgtcctgcccagtttccaaactgatgtccggcatagcacatagcaaacggacgagtttcaggcaatacttctttccctgaaaaaacattcaaaaaggattcggacttaatttcatcaagcgaaattccaaccgattctgctacttcctgtgaagtatgaatgagtttaggattggatggttttgttggatttacatacgagaaaagcgcattagaaacttgacgaacttcgttggtttcatttggatctgcaggcaattcagcagtaaatcggttgtttatttttaaatttttcattagaataatctttctctgactccaaattagaacgagttctgttggtagtgtgttattttaagatgtggtaaaaatgcttgtttactcccttaatttgtcggcgtacattttttttaatttatgaactttaggatcaattacgatctggcagtaacgtgcttcctgattgttgttgtaataattttgatggtctgtttcagcttcgtaaaaaacttctaaaggaacgagctgtgttacaatcgggtcttcataaaaggcttttacttcttccaaaactttttcggtaatcactttctgttcttcgttatgatataaaacaatcgagcggtattgtgttccgctgtccgcaccctgacggttcagggtggtaggatcatgactagtcataaatatgaagatcaggtcatggtatgaaattatgtcaggattaaaagcaacttgtatgacttctgcatgaccggttcttccggtacatacttcacggtagggcgggtttttaataaaacctcccgaaaatcctgattttaaggattcgactccttttaaacgctgaattacagcttcaatgcaccaaaaacatcctccaccaaaagtggcaactgataaattctccataaatagtattgttcaagatttaatgccctattaatccgatagaatattgtgataaattataagtaaaaagacagttaaaataaagatattaaatagttttttggtgtttgaactttataattgataaattcgcaattgtataaaaaagcaatatatttgcaattaaattcaggcacactaatgaacagcaaaaatagtaccatcactttagaaacctattttcaggattttagaaagaatattataggaattaaccaggagttttcttctccgtttggtaaaaagcagattatttataccgattggactgccagcggaaggttatatcgacctattgaagagaaaattcttaacgaatttgggccttttgtagccaatacacatacggaaactactgtgtcaggtactgccatgacaaaagcttatcatcatgccagatcgatcatcaagcgtcataccaatgcgagcaatgatgatgttttgatcacagatggaaccggaatgacgggtgttgtcaataaatttcagcgaattctgggtttaaaaattccggagaacctgaaagattgcactgttgttccagctgaaaagcgccctgttgtttttatttctcatatggaacaccattccaatcagacctcctggctggaaaccattgcagatgttgaaattattccatcttgtgaaaaaggacttttttgtctggataatttagagcaactgctggagaaatacagtgaaagaactattaaaattgcttctattacctcctgttcgaatgttacaggtttaaaaacaccgtttcacgaagctgcaaaattgatgcacaagcacaatggtgtttgttttgttgattttgcctgttcaggaccttatgtagaaatcgatatgcatcccgaagacccggaagcatatctggatgcaattttcttttctccacacaaatttttaggaggtcccggaacttcaggggttttaatttttaataaaaaactatacaacaatatgattcccgattgtccaggaggaggtacagtaagctggaccaatccatggggcgaacataaatatatcgacaacattgaggatcgtgaagatggtggcactccgggttttcttcaggtaattaaaacggcgctggcaattgagctgaaagaagaaatgggaatcgagaatattctgcaacgtgaacatgagattgtagagtatgtttttaatgaattggatactgtttccaacattaaaattctggcaggccaacataagaaccgtttaggggttgtttcgttttttattgaaaatcttcatttcaatttaggagtgaaattattgaatgacagatttggaattcaaaccagaggaggatgcagttgtgcgggaacgtatgggcattttctattgcacgtagatcaggaaacatccaataagctagtgagtgaaattacgattggagatttaattaaaaaaccgggatggatcagaatgtcaattcatccgactactaccgataaagaaattgcttttgtttgtgaaagcattaaagatttagcgaaaaatcatgaggagtgggctttggactattcctataataaagatacaaatgaatttgttcacaagaacgccggttcgtttgaagacgatttagtggccggatggttcaaatcataaaaatacataaatcagacaggttttaagaacctgtctggtttgcctgaaatttttttagagataagagtgcctgttcctgaattttgccttgaaaaaatcctgtccagcccattaaatatccggtaaaaccgaaagcctgtttcgaccatttccaaacatcgaaactgtctgtatgtttaataatcagaccatcctgaaaagtaaattcagcggaaatccgattgattaccgttctgttggttttgctaaaattataagttgcaatccattttgcactgcccgaagaatcatcggttttaatatctgaaaattcgattttaatgttgcctttacttttcgaaatcaacatttcccacattttagaaacctgctcttcttttagtaaaccaaaggcaggatcgataaaatgaatttttggatggtaacattcgctcattgttttagcatcggcattggcaaaagcagtatagaattttgtaattaaaacttcatttgaattcatgaaagtggtatttagattataaatataagaaattattatactaatataaacctgttgagtttaattagtaaaaaaatgttctcataatttcaggcctaaaaagagtgtaaaaaaaaggaaagtatttctttgtatggaagaatatgtgcttttaggtgaaatgaaatgtcttttttatggatgtagaagtgatatttccctgtgttaaaacagttagcatgaaaacttataaaatgctgattgcggctgcagtgtcaaaagtttttttagatttatcgaatgctgtcgaaaagtacgccattctgtttaaagcggtaaagtaaccggtctgatcaccaaaagcggccgtattgttccctttaatgataaatcggatggctttaatatctgttttttttagttttaccatttcagcaggggtgaaatagtaataagcggtagtttttccgtcaagagtttctttgatgtttttgtccacacaagcaattacatctccgttaacaaggtcaacgtatacgcctcctgagatttgagttttatcattagaaattcctattgatagttttaagacccctcctttatctgtttttgcaatctgaacttctgtttcgcccgtaaacacatatctttcacagataaaagtataactggttgttgccggaaatggtttagagccttttacacttatggtttgctgtgcatttacgaaactggagattaacaatacgattaaaagaggcagttttaaattcataggtttttactttattgttctgttattttggagtcaaatttttcgtcccaatccattgattttatagctgagatcagattatcttcgtttacaaaaatgcgcaattctttattggctacttttttggtgtacagggcatgatagcgataaataacctcttgcctggttctgtaaacaccgtccagttttaaatcgatgaaacttccatagtattgtctgaacctttgacaggttttggtcagacgttcttcggttgtattctccattaccgatttagtgacttcagtctctttaaaaggtttgaattttgaagaattgcaggtttccagtactctttttcctaattcatacgtttttttctgctgattggaatttatttcggcagcattgacttttttgatctttaaatcttcagtatctctgtggatggttttcgatttacatcccatcaacaacaacaaacatataatcaatcctgctttcttcataactatttaagtaatttttaataataagttgggatcagggcaattttcaatgtaaaagttcaaatcgttggtattacatactcccggataatcgccggaatagttttcgatgtttcgaataatctgaaagtgtacgtgtggaggatagtccccgttaacagacgaacttcccaaggttccaatcttttgacctttactaaaaaatgtcccaacactgaggttttctatactttctaacgataaatgtccgtataaagtataaaatttctcattttctacccgatgctctaaaataatggtcggaccataatcgccgagacctatattgtttttaaagctgtgtacttttccatcgagcggtgccaaaactgttgtgtctgcttttgtccataagtctaatcctatatgaatgttgcgttccggaatagaattatttttaaaaatggtactgcgttgataaagagttcttccttcaatataaccgccaaaggctacttcggcatcatttttttctaagtagtctgaaataaaatcctcaaattcctgggtacaggtaggtttaaaatcagcaagttcctgattggttacggataaatctaaagggatgtattttgaaatatcaatggtggaatctattattttggtgggaggtagggcttttaaaatagaggcaagaggtttcataaatttaaactactttttcgataattattaattcattgtgagcttcaactcgtgggagcatttttgaagcaaacagttcggggtcaatttcagaaatgtattttcggtttcgaacattatgcgcctcatctaaaatcatggtattaaataaaacaaatccctgattttgcaacaataaacagatacgttcgctaaaaaaacgttcgaataaaaaatttggcattttgatatcttcaaaaatatcaataataattaaattatatttattttttgtttttaaaacatactcaaatgcgtcatcaattaccacttccagttgtttgatttcattcaggttgaaatactcgttggctattttaatcatttcgggatcaatttctactccggtaattttacctttatactgaatttcgtccaccaaagttttaactacgcttccaccggcaactcccaataataaaatatgatccattttaagaatggtatcgtatccaatatttcgaagaccatatcttaagatgcgctgcaggcttccgtaagagtaatttgtattttcagaatcaagaaccagttcgccgttggcccaggtaacttcgatgattttgcttctttgtgatttttttttgaatatttttatgggaacaatataactgaacaatttttggatcattttaaatgcttttactcaaaaataccactttaaatcttttattttgcagtaaaaaagtaattaatgaaaaagcgattgtacaaattcattttttttaagctaatgggctggaaaatagtaggaatcgaaaatgctgaagtaaaaaaatgtgtgatgatggtaatgccgcatacaagcaatcatgatttttacttaggaatttttacccgtggaatttctggcttggagatgaattgggtgggaaagaaagaattattccgctttccgtttggatattatttcagaaatgtgggaggagaaccaatagatcgtaccggcggattgaataaagtggaatcgattgctgcaatttttgaccgtaaagaggtttttcgcctggctgtagctcccgaaggaactcgtaaaggtgttaaagaattaaaaagtggtttctattatattgctcttaaggcaaatgtgcccattattcctgtcgcttttgactgggggaaaaaagaggttaatttaggaaagccatttcttccaacgggggattatgattgtgatttgagtgtattgaaaaaacactatgaaggagttttgggtaaaattcctgaaaacggattttggagctgatttttttgctataaattctatcacctgagaatcgcttaactgaaaataattttaaagtttttcaaatactcaaaaatttcaaactaaggaacgtaagtcttgaaagttccgtttttataaaataccactatcttttcaatttcattttctgcagcatttaaattttggtttttaatttctgcagaggatgcatttttcgtttttatattttctgataaagaatttcctgaagcagcattttcgtctaatggaatagaggaaagagattttgtaaattcaggcactgattcatttttctttagatcggaactgtcttctgtttttggaaaattccccgtaccatttaaaatccagtataaatcaatttcaggaaaaacctccaaaatcttgagtacaaaatctaagctgggtttgtttctgccagaaagcaggtgagacatactggaacgctgaactccaattcgatctgcgaaagaggaagcatttaaggcgtaatagtctagtataatttcaagccgttttacaaaatcgtcgatgtttaccattgtaaattactgtttggaaatttgctgtttacaaatgtaatcaaaagcagtgcacaaaacaatttaagagtcaaaaatctttaattaagccttcaaatagcatatttattgctttaagtgattgctgttaattaattgaaaaataaaaagttgattttgtggaattaaagttacaactaatgtttattggtgaagtgagagggggttagggaatagagagaaaactgtttacaattctaaattaatttgtttacaaatcatttacaattgtaaaaataaagatgtttacttttgtaaactaatcaaaacacgatgaatttagaagaattatttcaccagcataaagaacaaaccatagaaggacgttatctgactttagatcatattcagcctttattagagcaattaaatacaaacaatcaagtaaagattattggtaaatcggttttaggagaacccgtttatagttatcaaattgggagcggtccaacacgtatttatctttggtctcaaatgcatggaaatgaaagtacgactacaaaagcgctatttgattttatcaatgtgttaaacagcggttctgagtttgcgcagaagatgttaaaaaactttactttttacagtattccaatgctgaatcctgacggagcaaggctgtatacacgtgagaacgctaataaagtggatttaaatcgtgattcgcaaaatctaacgcagccagaaagcaatattttaagatcggtatttgaggcttttaaaccgcatttctgttttaatctgcatgatcagcgtactatttttggggctggtgaaaccggaaaaccggcaacgctttcgtttttggctccttcttataatgaagagagagaagttaatgagaatcgtttaaaggctattaatgttattgccggaatcaatgatgttttacagcaatatattcccgggcaggtcggacgttttgatgactcatttaatatcaattgtataggggatacatttcagcatttgggagtcccaacgatcttgtttgaggcaggtcattttcctgatgattacgagcgcgaaatcacgcgaaagtttttattcttttcacttgtttcgagttttcaattgattagcgaaaacgatttagttgataatagaattaatgattatttgaatatttcacaaaataaagtggttttttatgattttatgtggaaaaatatcaaaataaattatgatggtatcgaaattattacgaattttgtcgcacaatacaaagaggaattgattgaaaataagattcatttcaatgcttacatagttgaagtaggcgatttggaaaattattttggacattatgaatacgatgcaaaaggtgctggttactctgatgactttggtagttttccgaaattgaatcaaaaagcagatttttgtttagataaaaatgttaaatttgttaacgggttgataaaaagttagattttttgtgaatttgttgttttttatacatatttttatactttgtaatagcaattagtaatattaattaaagaattatgagtaaatttcgtttagatgaagtagatcaccagattttagatatgttaatagacaatacgagagttccgtttactgacattgctaaaaaactattgatatctgctggtacagtgcatgttagagtaaaaaagatggaggacgcagggataataatgggatcttcattagccttagactatgataagttggggtattcatttattgcttatgtgggtgtgttccttaataatacgtctcaaactaaatttgtattagagcgaatcaatcaaattccattcgtaacagtagcttctgtaacgacaggaaaattcaatattttttgcaaaattagagcaaaagatactaaacatgcgaaagaagttatctttatgattgatgatattgacggtgtttacagaacagaaactatgatttcattagaagaaagtataaacgataagaagcgtttgatgcatactatttttaaaaatatgtaatattttcttgaatgctatatctaaatataacctcaagtttattcttggggtttttttatgaccaattaaccaaccaactacccataaattatgtacacgttaccaaaaatcgaacgtttcaatcaggacgttctttcaaaataccatatttacaatagtgtatttataacattaccttttgattcaattgataatacaggagttttacttcctttgtttacagatacttgtgagacaggattcaaaaagcaggaaactcctaaagaaattgttaatttcttctctaataaattcctgaatgatgcttcagaaaaagacaaaatcgatttaatgtttcgatttattcagtatatcgaacgtcagattgtattgtttgatgccattgaagatgctgcttttccggaagttaataatatggaagggcgtggttcgttgcgtgacattaaagaaaaatcagatgcaaaggagaagaatgaggagttgattgagtttttagaaaactttaatgtcagaactgttttaacagcgcatccaacgcagttttacccagggcctgttttagggattataaatgatttgaaagatgctattcgttcaaatgatttattaaaaatcaaacaattgttggcgcagcttggaaaaacaccttttattcagaacgaaaagccaaatccttatgatgaagcggtgagtttgatctggtatttagaaaatgtgttctacgctacttcaggagaaattgttcactatttgcaaaaaaatatccttcaggggagttctattcagaatcaattgataaaattgggtttctggccgggaggtgatcgcgacggaaatcctttcgttacgaccgatattactttaaaagtagcagagcgtttgcgtacctcaattctgaagtgttattatatagaaatgaggaatttaaaaagaaagttaactttctcaggagtagacactttggtttccgaacttgaacataaactttaccgttctgttttttattctaaaggcgagatttatatcactctggaagaattattatcgcaattaaacaaaatcagaaccataattatagagaagcatcaatccctttatttagatgaactggaagcttttctagtaaaaattaatctatttggttttcactttgctacgttggatatccgtcagaacagtaaaattcacaatgctgtatttaaagatgtggtggatttttatctgaattcgggttcagagatatttccgaaaaattactttgatttgtctgaagaggagaaattaggggttttatcgaaagtaaaaggggacttgaatcctgctgactttgaaaatgaaattacaagatcaacattagaatctgttcaggccattaaaaccatacagcaggcaaatggtgaatctggagccaatcgttacattatcagtaataacgaaagcgctttgaatgttatggaaacttttgcgatgattcgtctgaacaattgggagaatccgacggtagatattattccgctttttgaatccgttgatgatttacaaaatgcgcatcagattatggagcaattgtatagtaattcagaatattcaaaacatcttgaagcgagagaaaacaaacaaaccattatgttaggtttctctgacggaactaaagatggggggtatttaatggcgaactggagtatttatcaggctaaaatttcattgacagaaatttcaagaaaatacggtatacaagcaatattttttgatggtcgcggagggcctcctgctcgtggtggtggaaaaacgcataaattttatgcttctttagggccaaaaatcgagaataacgaaattcaaattacgattcagggacaaacgattagttccaattttggaactttagattcctgtcgttataatattgagaacttattaagtgccggagtgaccaatcaggtttttagtaaagaaaagaatgagctgagtgttgaagaaactgaaattttgacacaattggctgatttaggatatgaaaaatacctgagtttcaagaatcacccaaagtttattccgtatctggagaaaatgagtacgctaaaatattactcaaaaaccaatatcggaagccgaccgtctaaaagaagtaaatccgaatcacttgattttgctgatttgagagcgattccttttgtgggatcctggagtcagttaaagcaaaatgtaccgggattttttggggttggttcagctttgaaatattttgaagaaagtggacagtgggacaaagttcaaaatttgtatcacgattccttgtttttcaaaacattgttagagaatagtatgatgtcattggcgaaatcatttttacctttgacggcttatatgaaaaatgaccctgaatttggtgaattctggcaaattatctacaatgaattttcagaaaccaaacgtcttttgttgaaaattgcagggcataaaacgcttatggaaaattaccctgatggtatagcatcaattcaaataagagaacgtattgtattgccattgttgacaatacagcaatatgctttgttaagaattaacgaattaaataaggagagtgtggtagatgaagacttggttaaagtgtatgaaaaaatagtaacaaggtcacttttcggaaatacaaatgcgagtagaaactcagcttaaaaattataaaaaatgaacacagctttattaacagaaaatgaatattctggcggatttgccaattacatcaaagaagccggagacgtaaatttatttgaagaattagaaatttcattgcatgagtttatcagatttgtgcaaaatatcccgatggataaatttgattatcgttacgcagaaggaaaatggacgattaaggatattattcagcacattatggattgtgagagaatttttgcttaccgtgctttgcgattctcgcgaaatgataaaacggctttaccaagttttgaagagaatgactatgcgattagtacagattcaaatagcagaagcattcagagtttattaacggaactctccgctttaagacattccaatttgttgttttttaagagtttgtcagaagagcagcttaagagaatcggaacagcttctaatcttcagatttctgtacgtgctctgggatttgtaatgattggacatcaaaaacaccatcagaaagtttttgaagaacgatatttgtaaaattctttcttatataaaaaatcctgtagcgtttaactttacaggattttttactttttcagttaagctatttttttctcttcgtacgggagggctcgggagataaatttttgtcgccacgacccaagcgatagcgaacaggcgaagcaattcacgaatttttgtttttatgtcatctcggcgaagtaagaaatcacatgcgctgagtccaaactgaatttctacactatttgtcatttcgaccgaagggagaaatcacacaagaaactccgctcctagaatctcaatctttgtcgaatatcgtgtgtgatttctcattcctcgaaatgacaaaaaaagcaagtcttacttgtttcgttccacaattgcaagtcctaaacgaattttgtcataactcattttctcctcaaaataatcaaagtagggttttagagcagaagggtattccagttcgatttgagctttgtgcaattgtttgacttcttcatttgttacaaacgaacttaaatcaatttcttcaccgtcaagatatagtttggctaagtgagatataattgtggtatagcctaaatttctttttcctgcaatttctgtgaccgtttcgccatttctaaaaagttctaaagtagtcttataagtgttgctttcttttttaacttttgtgtttgtctttttggctttctgaaattgaatgatagcctttataaattcagaaccatatctttcgagttttgcatttccgacaccatcgatagcaaggaattcttcatcactcattggtcgtaaggtttccatttgtctcaaagcagcatcactgaaaattacgtaagccggaacttcttcttcctgagcaatttcgtagcgtagttttcgtagcgtttcgaaaagagaatttttggccgtttttgtattggcttcttttacttcatttttatcaattacctttttaacgactgtatttagttttactttttctccttcaaacaaaacttttttcgcaaaagacgttagtaaaattttattgtgctgatgaaaggcaatttcgagatatcctaagttgatcaactgaattaagtattgattccaatcgtaccaggagatgtcggatccaattccgtacgtttttagactttgatagtttttttcgtagatatacgcatttctcgagcctcttaaaaaatcaacaattacagctaacggctcagattcttttaaacgggcgattgcagacagcgctttttgcgctaaaatagttccatcaaaaaaggtgggcggatttttgcagatgtcacagttaccgcaattttcttttaccagttcaccgaaatacgaaagaagaatttttcgacgacagcttaaagcatccgcgtattgtttcattctttctaattttgccaattgcacatcggagtttaatccttcggaggcaaatttttgtaattgtattacatcggcgtaactttcgaacattacggtttcagcaggtaacccatcccggcccgcacgaccgatttcctgataataaccttcaatatttttgggtaaattgtaatgtataacccatcgaacattggatttatcgattcccattccaaaggcaatcgtggcacaaaccacctggcaatcgtcatttataaaatcatcctgagttttagctcggattttattgtcaagcccggcatgataagcctttgcagtaattccattcttctttagtttatccgccagttcttcggttgtttttctgcttaagcaataaacaattccggattcattgggtttcttttcaataaaatcaacaatttgtttgacgcggtctaaagccgggcgcacttcgaggcttagattttttcggtcgaacgaggctacgaacgtttttggatttctaagttttaactgtttgattatatcagttcgggttgctttatcggctgtagcggttaaagcgagaaccggagtagaagggaagcggctctttaaatatcctaaattagtataagccggacgaaagtcgtgtccccaggaagaaatacaatgcgcttcatcaattgcaattagactgattgtcaattcgttgaaagctaagtccaaataagacaagctctcgggcgcaatgtaaacaagcttgaaagtgtttgattttaaattgtctatgtaaaattgttgttcctgactggattgactgctgttgatgtaacaggcattaataccatttgtttttagactgtcgacctgatctttcatcaaagcaattagtggagaaatcacaattgtgattccgggtaaaactaaagcgggcagctgaaaacagattgactttcctccgccggttggcataatagctaaagtgtcctgaccggaaagtatcgtagtaatgattgtttcctgattgggtctgaatttttcaaatccgaaattttcctttagtttggcatgtagaatttctgaagtcatggcgttgattgattaggaagaaaagtaaaaagcaaatatatagtatttttcttatttttttaaacagaggatttatgaagtcataaaaaaaaggaactccaatagagttcctttaaattatcttgaaaaagattgcttaatcttcgtcttcatcatcttcgtcgtcagcaatatcttctttgtcttcgtcgtcatcgtcgtcatctccattgtcaacatctggtttgtcctgattgtcatcatcgtcgtcgtcgtcaatatcgtcatcaagatcaagaccttttacaggttcgattgtatctacgtctacgtcgatatcatcgtcttcatcataattttcgattctgtcagcaagcttagtactaatttttaccaaataaatagtgtcttcagtacgaacttcaacagcttcaactaattcgtttttagcatttctaaaacggattacatccgaatcatcataaccatcaggaaatttttctaccaaaaggtttaaaatttcgttggtaagtttagcgtagtctactataactcttttcatatatatcttatagatctaataaataagcaaaaattaatggagccacaattgtagcatccgactctataataaatttaggggttttgatgtctagtttcccccatgtaattttctcgttcggaactgctcccgagtacgaaccataactggttgttgaatctgagatttggcagaaataactccagaaaggaacatcgtgcatttccatatcctgatacaacattggtactacgcaaatagggaaatctcctgcaataccaccaccaatttggaagaatccaattccgttagcgctgttttttggataccaatctgcaaggaaagtcatgtattcaattcctgatttcatggtagaggcttttaaatcgcctttgattacataggaagcaaagatatttcccattgtactgtcttcccatcccggaactatgataggtaaatttttctcagcagcggcatacatccagctgtcttttaagtcaatttcgtaatattcttctaaaacgcctgataaaagcattttatacatgaattcatgtggaaaataacgttctcctttatcatcagcctctttccagattttgtagatgtgtttttgcaaacgacggaatgcttcatgctcaggaatacaagtatcagtaacacggtttaatcctctttccaataaagcccattcgtcttccggtgttaaatcacgatagtttggcactctttcatagtgagagtgtgctactaaattcatgatgtcttcttctagattggctccagtacaagaaataatttgtactttatcttgtctaataatttcggcaaaaattttaccaatttctgctgtactcatagcgccagccatacttaccatcattttagctccattagccaattgttgttcgtatgcttttgcagcatctactaaagcggcagagttgaagtgtaaataatgtttttcaataaactgactgattggtcctttcatttgttcttgtttttttattttttttttgaattaaaagtttaaccttttagttgatactgcaaattaataattttatatttattaacatttatttagcagtatttttttttaaaccttttttgtatatcctaaaatctttaacacatcgtcagaagtttgttgttcagagaaaacttctgtagctaaaatgccattttcatcgcgatctattaatatatgtttaggctgcggaatcagacagtggtgtaaaccgccatatcctccaatagtttcctgatacgcaccagtattaaagaaaccaatgtatagtggcttttctttgttgtatttaggtaaataaatagcgttcatattttgctctgagttgtaataatcgtcactatcacaagtcaggccacctaataaaacccgctcgtaagtatcattccagcggtttaccgccaacatgataaaacgtttgtttattgcccaagtatccggcaaagtggtaatgaatgacgaatcaatcatgttccatttctctctgtcattttgctgtttttgatacaaaatctgatagatcgcgccaccgctttcacctaccgtaaatgatccaaattctgtaaagatgttgggtacatctacttcggcttcgtcacatgcaattttaatctgattgataatttcatcaatcatatattgataatcgtattcgaatgcaagagagtttttaatcgggaaaccacctccaatgtttaatccgtctagggtagggcattcctttttaagggcaatgtatactttgatacattttaccaactcattccaataataggaagtatcgtttattccggtattgatgaaaaagtgaagcatttttaactccagtttgtcattctcctgaatttgttttttatagaacgaaacgatgtttttgtatccaattcctaatcttgaagtatagaactcaaatttaggctcttcttcggcagcaatacgaattccaattttgaattttcctttgatttcagcctgaagtaaatctaactcttcgtagttgtcaataatcggaattgtgtttttatgcccgttattgatcaatctcgcaatattactaatgtattcgtctcttttaaatccattacagattacataagtacttttgttgattttaccattttctaataaattctcaacaatatttacgtcaaaagccgaagaggtttcaatatgaatgttattcttgaaagcttcattcataatgtattcaaaatgagagctttttgtgcaataacagtagtagtacttggcatcgtacttatttttctccattgattttctgaaccaggcttttgccttattaatgttctctgaaatctgaggtagataagtaaactttaaaggagttccgtattgctctaccaatttcatcaaatcgatgttgtgaaattgtagattgtctttgtttaatttgaattcttcctgagggaaatagtaagtttgattgataaggtcagaatattttgtattcatttattttttaatatttaggatgtgatatttaatttagatgacgaaaattcaatctaaaattcaaaccctaatattagcaaatataatttccagcttttcgtgttctgctttcgagcacaaaaagacatcaaaacaaaatggacttttactattataaaaacggttcaacattcttagtaaagaactgttgaggcggtttctgtaagagttaaaatgtctttgtttactgttcgttttcatcgtggcaaatgtaaaaaataatatatacctaaagcaaagcttttttattaaaaaaagtttaagatttataatcctgaaacgcgtctagaatcaatttattttcaaccgattggttaatttttatttttccgattccttcgattaaggcaaattgaattaatccgtactcattttttttgtcgtgaatcagcaattcgaggatcggatcgatgtcgttttcttcgatttttacgtcttcgtaaatactcttaattgcggttttaatttcggcatattctgctgctgaaattaagtttttgtgcagtgaaatataactttccaatatcattccaatcgcaatggcttcaccgtgtaatagtgttgtttttgtttcactttctaaaaagtaaccttctatggcatgtcctaaggtgtgtccaaaattaagggctttacgaatgttcttttcggttggatcctgaataacaatgtcattttttatctctacagaacggtaaatcaattcgtcaaaatcagcgtaatcaattgaatttaaatctaaaaactgcttccagtaggcggaatcgtaaatcaacccgtgttttagcatttcggcaagaccggaacgcatttcgttttgcggtagcgtttcaagatattgtgtgtcaattaataccatttgaggtacgttaattacaccaatttggttttttaaatttcctaaatctactccggtttttcctccaacagaagcatcaaccatagataataaggtagtagggatattgataaaatctactccgcgcttaaaagtcgaagcaacaaagcctcctaaatcagttacaacaccaccaccaagattaataacaagtgattttctgtcggcaccaagttctgtcaagactttccatacttcaatacaggtttcaatatttttattgatttctcctgcttcaaattcaatgatctcaatggttagatcagtttccaataaaggtaaaaacttcggtaaacaatgctcattggtttgattatcaactataataaacacgtttgaatatttactttcttttaagtgatggtttaaagcttcgtatgcattttggttaaaatgcaccagataattattagcctgaatagattgcatatctctgtcgttgaattgaaaccgcaaaataaggcatttttaactaaataatattcaaagttttgttctaatttgtattaaaacgaatcattctatataaggtttcaaggtgtttgtctgtaattttctttcaaaaagattgttatgtggcaaactcttgtgttgcaagctgtaaaaatataacaatgttgttaatgatattgaaaaattgggtagtgattattgacaaatattcaaaactctatctatatttgcataaaaaactgaccttaatggaaaaaatatttgataacactcaggttgcattttcgctaaaaagtgatacggaacttgacagagcttattttctttttaaaatgatcgacagccagcctttggtgaggataggaaccgctgttactaattttgctattaaagcgcatcttccggtagagggattgattcgtgcaaccgtttttgaccatttttgtggtggtgtaaacgaagacgattgtattacagtggtagacaaaatgtttactaaaggtgtttcatcagtgttggattattcagttgaaggaaaagaagaagaagagcagtttgatgctgctttagaaatgacactaaaaaccattgaatttgcaaaagaacgtctagcgattccgtttgcagtatttaagccaaccggttttggacgtttcgaattatatgaaaaattaggcgagaaacaaacgctttctccagcagaacaagcagagtgggatagagtagtagcccgttttgatcatgtttgtgctgaagctcacagaaaagatgtggctttgctaattgacggagaagaaagctggatgcaggatgcggccgatgatttggttaccgacatgatgcgtaaatacaataaagaaaaagcgattgttttcaatactttgcaaatgtaccgttgggatcgtttggattatttgaaaaaactgcatgaagtggctaagaacgaaggtttctttataggaatgaagatcgttcgtggtgcttatatggagaaagaaaacaaacgtgcggaagagaaaaattacgtttccccaatttgtgtttctaaagaagctacagatattaattatgatgctgctatacgttatatggcagagcatttggaaagcatgtccatttttgcgggaactcacaatgaattgagttcttataaactgatggaaatcatgcaggaaaagggaatttcgaaaaacgatactaaaatctggtttggacaattgtacggaatgagtgataatatcagttacaatttagcagagaacggctataatgttgcgaaatatttaccattcggaccagtcaaagatgttatgccttacctgattcgtcgtgcagaagagaatacttcagttgcaggtcaaaccagccgcgaattgtctatgattaaagcggaacgtaaaagaagaaaaggaaaataaattaaagtaaaattccaatacaataaaaaatcccaaatcccaatcgtaacaattggaatttggggttttttattgattttgtcttatttgtctattaaatccgacggtttttaaatccggtcagatttaggtattgaattaaaatgaaacctggcattgtaaaacgaccattcctaatcggtcactttgtttgtaagcacctgtagggtttttgtcgtaaaccgctctgttttgatagtttaaactgaattttggtcccaaagtaccggtagtgtaataatttacacctaactcatacatagtcattggactgtctaatgcttccaagtctgcaatttgtgtagcagcatacggctggaaacgaccttttttggattcgttatctgattttccaaaaagatatcctaactgagcgtaataaatatttccggttcctacaccgataaatccggcacctgaaccgtttatcagagaattatcgcctatagcgggattgggtgtattaacagactggatgtaattttttccgtaattattattgttaaaagccgcgtaagcagttatagcagcacctttactgttaattggactgtcgtaaaaaacatcaaaacccagtattctcatatcgtcgtatgcgatagccgcatcaggagttaagcgccacatggctttggcttgagtcatatagcctagtgcgatattaaagattttctttgttcctaaatacgttcctttgtggtaggcatcttcaagagattctttatcgaagaaagaataagttaagattcctgcatattgtgcttttggtgtttgtgtgcttaccgaagaattaatgcccagattgtcagttgtacttcggtatggattggtaatagcggcacgataattaaatttgcccagatcacctttagcgtaaatacttagatttcggtttccgaatgtcgatgaaatattagtaaactgctggtacatgggcgtatccagagtaagatgcgaggaagaactattcgctgaataacgagttgttccggctccccaggctgtcaatccaccgccaatatgaagttttttactaaaatgatattctcctaaagcatccataactgaaagcggtgcatttgaaggtccattgttttgtgtgaaattaatattgttctgtcccagttgaagatgaaagaaaatattctccgtcagcattcccattgcctgcaaacgcaaacgtctgatgacgatatcgtaagtatcactaacttcatttgtgccaattttacttcctttgttcaattcggaatatcttccccaaacctgaaggttcattccaaatttgatgtattgtgatccgtctttggaaatattaaccacattaaaaggtttttcctgtgcaagaacattgatcgtatttgcaacaataaataataaaattaaagcgattcttaaatgtggcatttctttggtttaaggttagttaatactgcttacattctaattaggagttgctgaattgaaggttgcttaagtttttataagttccattctccagattgatcaattcctgatgtgtaccttcttcggtaatttttccatgatctaaaaccaaaattttatcggcgtttctaatagtcgaaagtcggtgtgcgatgatgatgcttgttcttccttccattaaaacttccaatgcttcctgaaccagtttttcactctcactatctaaagatgatgttgcttcatctaatattaaaatactagggtttttaagtaatgctcttgcgattgcaatgcgctgacgctgtccgcctgataattttacgccacgttctcctaccagggtttcgaatttctcagggaaaccttccacaaaattaaaagcattggcttgttttgccgcggcgataatttcttcattggtagcatccggctttccgtaagcaatgttttctctaatggttccaccaaacagaataacatcctgcggaacgatactcatatttccgcgaagctcttctaaatcgtagtcatagatgctttttccatcaacagtaatgtcaccagatgttctgtcgtaaaagcgtaaaaggagcgaagagatagttgattttcctgcaccgctagggcctacaatcgcaattttctgaccaaattcggcagtgaaattcacctcttttaatacctcaacttcttttctggaaggataactgaaagcaacatttttgaaggaaagatttcctttgattttttcaattggggtagttctggttttggcattgatatcctccggagtttcttctagtaattcaaaaacacgttccgttgcgccaactgctttttgaatctgcgcatacatttcggcaattccgccaaaagaagcaccaataaatgtggtgtaaagtacaaaagaaatcaaatctcctacgccttccacttcacctttaatggttaaggtgattccgtaccaaaccacagcaacgacacagccaaaaagacaaagaatgataaaagaagcgaagtaacctctgtattgaccgccttttatagcgatttttacaatttctttgattttatttttataacgctgaatttcgtaccattcgttcgcaaaagcttttacattgcttattccttgcagtgtttcttctacaattacctggctttcggctactttatcctgtgttttctttccgtacttgcgaatgaatcttccaaaaacaactgccgctacagcgaccacaggtacaatagccaacatcattagagttaactttggactgatgttacctagaataacaaatccaccaataattaggatcaactgacgtaaaaattcagcgatggtcgtagtaaaagtatcctgtagttgtgaaatatcagcactgattcggctgtttagttctccaacacgtttttgagaataaaatgacatgggtagttttactaagttttcatacaaagcaaaacgaatgtttgaaagtgaattttcagtgaaatttacaaaaagcgaaattctgaaaaaagagaaaatagcttgcagcgtaaggatcaccataagtccaactgcaatttcgttagctctgttgagatttttattggtaacgcaatccacgagcatacccattaatttcggaaaggccagggcagtggcgctggttaataagagaaaaatcaatcccaaaaagaatttccatttgtgatttttaccgtatttaaaaattcgtagtgctttttgaagtgaattagagtctaatttagctttaggtaaatcgttttcttgatatctaggcatttgagtatactattaaggtatgcaaatgtatgattatagccagtgaatacaaaagaatattcgaaattaggctttgagattttattttttaactaaatggtaaaaaatgatgaaaaatatttctgttttaaaagattgataaatagattactaaaaattatttcgcaaaatgatgtaatttttcttcaaaataagcttgtaaatacaaaatctagtcgtaaatttgcactcgcaatcacaaaggatagcgacctaataaaatagggcgattagctcagctggttcagagcacctcgtttacaccgagggggtcgggggtaaaggatattttaactatttcgaatatagaaaatgaagaatatgcaatttataatttaacagggcagcaaatacaggctggtagtactcagacaggacagattgatgtcagtaatttgtctaaagggctatatataattaaagtaaaaagcactaataagcagtttatgaaagagtaataggatgacaatggggctattgcttattgctaagatagcctcattgtttttttttttttttcaagagtttggtgtcttatatgttttgccagaagtaggttcaaagctcacagggctaaagaagtaaactaaagaacgcggcttacagtcaacccatcacgtataggcaataaaacggtttcgactcttgggtcatttttcaagagtagattgtactccaaaaggactttggtactaatgtcatttggatgaaccggttccagtatttttccactccataaaacgttatccgataaaataataccgcctttgttcattttgggaacaatcatttcccaataattgatgtaattttctttgtcggcatctatgaaaaccaagtcaaacttgacgtccaaagttggaatgatttcgacagcttctcctaaatgctggaaaatttgttttccccaaggggacgcatcaaaatatttacgttgaaaatcgactaattcttctttaatgtcaatggtatgcagttgcccgttttcctgcattccctcacacagacacaaagcagcataaccggtataagttccaatttcgagaatgttcactggacgaatcaatttggagagcatgcttaaaacacgaccctgaaaatgcccgctaagcattcttgggagtaatattttttggtacgtttccttatttagtttagccagcaattccggttcgttttcagaatgttgctcgatataatcttccagttcttgagaaataaaatgcatcttgtagtatcttctaattttgagtgtaaaaatacgaaaaatagtggctcctttttgggtataaaaaaaccattcgttgtagcgaatggttttagtttcataaagcgaagagactattttttcaaagcctcattaacttctttagctgttttcaccgtaccgtctttagcagctttagcagcgttttctactttttcagcgccttttttagtagcgtctttcacatcttcagcggcttttttggtagcttcttttacatcttcggcagcattttcagttttgctcactgcgctatcctttacttctttaatatcggtagttaaagaatcaactttgttgccaagagttaattcttcctctgcaggtttcggttccttcttttcgcaagattgtacagtaaatgctaatagagcgataacagccagacttaagatttgttttttcataagaaattgatttttttagattgattaaatttaaaagttataaagctgaaaaataaagatacacattttaaaatgattgagctctttgtaagattattttccttttgagtgcaagacaattctcgtgccaaagttttgagttttgaaatgctgagcaattttttttattcatttttagaatcgaaaagtatttattgttccatactttatattttgctgcttttaaaacgttatttaatcactaatatattatcattttttgcaaaatcagtcaaagtgatgttgaagattactgttaattctttcccggctctaacaactccaagtgctgctgatggggttgtcatttcaaaatcactaaaagtcattcggttagagccttgcagcgcaaaagtaccatctttataggctgttactctgatctgggttttataatctttactaacacctgctatagtgtaagttccggtaagattccaagtgttttcgtttactttttcggcagattttagaacgtatttaatgtttttatggtcttcggtttccagagctttataagcaacatcgtccatgctgcctttgccgctttttaagctttctgctgataaggaaacagtcaggttttttatatctgtaattttcgaatctgtaacagttaaaaaagcacttcccactccgtctgaagatttcatcgtccaatcgtgtatgttggaagttcctgcaacttcaaaggccgattttgataagctatatcttttttgtgagtttacttgtaaagataacatcagtactgctgctaataaaatagattggatcgttttcatttgtataggtatttgttaaatttaagatcagtttgcggttcagttgatttttgataatgagttactgtctttttcttatgtcaaatttattacgaacgaatagcaaaagacctgataaaaatcatggttaggtttttatttaaagcgtataatagagagaaaatacattttctgagaaatgttttaaaaagtgattaactttgcagcatgcaaatggagaaaaaagatataagagccttaacaaaagatcagcttcgcgatttttttgtcgctaataatgacaaagcctttcgtggaaatcaagtctacgaatggttatggagcaaaggagcacacagttttgaagacatgaccaatgttgccaaaacaactcgtacgatgctggaggaaaattttgtaatcaatcatatcaaggtagataccatgcaacgcagcagtgacggaaccgtaaaaaatgccgttcgtctgcatgatggtttagtggtagagtccgtattgattccaacagaaaccagaacaacagcctgcgtttcaagccaggttgggtgcagtctggattgtaatttctgtgccacttcacgattgaaaagaatgcgaaacctggaaccgggagaaatctacgatcagattattgcgatagacaaagagagtcgattgtatcacaatcatccgctttcgaatattgtttttatgggaatgggtgagcctttgatgaattacaacaacgtcatcaaagctattgatatggttacctcgccggaaggattagggatgtcaccaaaacgtattatggtttcgacttccggaattccgaagatgattaaaaaaatggccgatgatgatgtaaaattcaaactggcagtttctctgcattcggctattgatgacgtacgtgcgcgaatcatgcctttcagtaaaaattttccgttaaaagatttgcgtgaagctttggaatattggtacagaaaaaccaaaagtaaaatctcttacgaatatgtagtctggaaaggaatcaatgacgacaaagcttcgattgatgctttggtaaagttttgtaaatatgttccatgtaaagtcaatttaattgaatacaatccaattgatgatggcgagtttcaacaagcttcagaagaatcaattctggcttatataaaagcattgggaaatatcggagtagtcgtaaaagtacgccgaagccgaggaaaggatattgatgctgcctgcggacaattggccaataaagaaggataaataatgtttggcggttttgtgctgcaaacaaaccgtttaataaatttttaaagatgccttgttcttcaaggcattttttatagagcattgcctgagagccgacacttttgttgataacgaattcaaattgagacagaagaaagttttcggcccgttttttttacattagtatttaaattattgatatactaatgtaaaatacaccgtatttttttatttaaaatagtatatttgggatcgaaatgaatattacttctcaaataaaacagcccatctttaacgagatggaactttttgaaaaaaagttccatgaatcgatgacctcaaaggtggctttattgaatcgtattacctattatatcgtaaaccgaaaaggaaaacaaatgcgtcctatgtttgtttttctaaccgctaaaatggtttctgaaggtattgtaaacgaaagaacctatcgcggagcttctgtaatcgaacttattcataccgctactttggtacacgatgacgtggtagacgatagcaatcgccgtcgtggatttttctcaatcaatgcactttggaaaaataagattgccgttttggtaggagactatttgttgtcaaaaggactgttactctctattgataatggcgattttgatttattgagaatcatttctgtcgctgttcgcgaaatgagtgaaggcgaattgcttcaaattgagaaagcaagaagactggacatcaccgaagaagtatattacgaaatcatccgaaagaaaacagcgacacttattgcggcttgttgtgcacttggtgcaaaatcggtaattgaagatgatgctcaggtcgagaatatgagaaaatttggtgaactgatcggaatggcttttcaaatcaaagatgatttatttgattatagcgaagaagcgatcggtaaaccaaccggaatcgatattaaagagcaaaaaatgactttgcctttaattcatgttttaaatacttgtaccccgcaagaaaaaaagtggttgataaactccatcaaaaaccacaataaagacaaaaaacgcgtcaaagaagttattgctttcgtaaaaggtaataatggattggcttacgccgaacagaaaatggtacaatttcagcaggaagcacttttgttgttggataattttttagattctgagtttaaagatgcccttgttttaatggtaaactacgttattgaaagaaagaaatagttttttttaattagataatcaggaaatttgttaattagaaaattgatttactttgttgtaaatgaatgttttaattgtgttttttttggaatttgtaatttttttattgattttttttccattctcatgcaaccatttcaaaacgttatgcgtctatgctaatagaagtctgttactaaaccaaaaccaaccgcttattaatgaaaattattcatttacatcaggaagaaaccgaaattataaagttggctgtcgagaataatcggcaagcacagcaacaaatttacagtcggttttcttcaaaaatgttaagtgtttgtcgacagtatataaaagacattcaattggccgaagatgtgatgataaccgcttttatgaaagtgtttaccaatttaagcagatttgagcacaaaggaagttttgaaggttgggtcaggcggattatggtaaatgaatgtatttcatatttaagagttcataaaaaagtaaagtttagtgaagaagaaatttatatcgaagagagtttcaatgccattgacagtcagttttcgatcgatcagattcagttcttaattgatgctttaccggaaggttataaaatggtttttaatttatacgccatagaaggttacaaacacaatgaaattgctaagatgttagggattaatgaaggtacatcgaaatcgcaattatcgcatgccaggaaaatgctgcaaacacaaattaatagtctaaaaaaacaagataatggaaccgaataattttgaaaaggatttccgtgaaaaactaaaccaacgtaaaattgaaccaagtgataaagcctgggatcgattggatgcgatgttgagtgttgctgaagaaaagaaaacaacgatcgatcttcgttcacgacaagccgggaaaaagaaatggatgtatgttgcggcaagtttggttggttttttatgggttggaactttcttttttaaccaaaagaaaaatacagatgtaacaccaaaagacattatagtggttaaggaagatgctaagaaagattcggttgtaaagccaacttttgataccaatataggggttgaagaagcagtagcagtttcagaagaaaaaacaattaaaaagtcagttcaacaagaaaagcatcaggaatcaaaatcgaataaaatcattgcaaataaacccaatgcaatagcggagtcttcaatcatcatcaaaaacaatcctgaaaaacaatcaatcaatccacagcctttaatggctaaaaatcctgaaaaagaaacggcagatcagttgctgggaacagctgaaaaagtaatcgtcgctgagaatgctgtcaagccaaaatcaaaagtaaaaattaatgccaatgatttgcttcaacaggtcgatggtgaattagagctttcgtttcgtgaaaaggtaattacaaaagtcaataaaaattaccaaacggtaaaagtggctttggccaatcgaaatcagcaggaataaagtttccaactccaatcaggaacgtgctgttggagaaaatcaaaaattaaagatcaaaaaaataattccgatagttgtcgggcaggcttttagtgccaatttttaatccaattaaaaattgagaattaaaaaataattgtttgtaattcacattttacattttacatttcgcaattagaaaaaaaacatcaatcaacaatcaaattttaaaaaaaacagtcatgaaaaattttaccattcacctcgttatcctcgtcttcttatttgtaagtaaagttatgggacaggaaacttttgaattaaaagcgagaaaaattgccaacaaaatagagaaagttaccaaagaggaaaaagaagctttgaaagaagaaattgaagcaattaatgttcagttgtctgaagggaaaatcactcaggaacaagccgacaagcgtaaaaaggaattagcagaagccagagcggttattatcgaagaaaaagtaacactggcgcaaaatgagttaaatgatttggtgcagcaaaaagtagacggaaaaatcaaggaagggaattataaaagtggacgtgctttgattgttcattggaatgacatagaatggaaggacaataataaaaaaagaaaagattctatacgcggcgaaagaagaacgacatcgcagtttgtatttgcagcaggtttgaataatatgatggttgatggtaaattgcaggatgctaaatataggtttacaggatcgcatttttacgaatggggatttacctataacaccaggttaatgaaaaacgataatttattacacgctaaatacggattgtctttaatgtataataatattcgcccgagagataataaatattttgtagtcaatggaaaccagacagaattgcaaaccaatgcgattcatttagaggaatcccgttttagaaatgtgtacatcgcagtgccaattcatttagagtttgatttttcaagaccaaaagtgagtaacggaaaaacgtattttagaacacatgatagttttcgctttggaattggaggttacgcaggagtcaatgtaaaatccaaacaaatcttaaaatacgatcaggatgatttagattataagacaactataaaaggagattacaatgtgaataattttatttacggattgagttcttacattggttataaagaaatgagtttgtatttgaaatacgatttaaacccattgtttaggaataatactgtaaaagaaaataatatttcattgggattaagatttgattttaattaagaatacaattgattagttagtggaaagagcgcttcgaaagaggtgcttttttttatttaaaattgcccgatttcatgggggatttgtgtaattttacatccttcaaattttataaatattttacgttttgatttcacaaagtacgattgatgctgtttttgatgctgctcgagtagaggaggttattggtgattttgttaatttaaaacgagccggaagtaactttaaagggttaagtccattctcagatgagcgctctccgtcgttcatggtttcgcctgcaaagggaatctggaaagattttagtacgggaaaaggaggtaattcagttaagttcctgatcgaacattcacagtttacctatccggaagccattcgatatctggccagaaagtacaatatagagattgaagaaacagaacagacggatgctgaaaaagcaatgacagatgttcgcgaaagtatgtatctggtttcggaatttgcgaaagactattttcataaaatacttttaaattcagaagaaggaaaagcaataggactttcttattttaaggaaagaggttttaccaatgaaaccatcaaaaaatttagtttaggatattcacctgaaacctgggatgctcttaccaaagaagctctggggaaagggtataagctggagtttctggaaagtaccggtttgaccattccaagagaagaccgtccgtttgaccgtttcaaggggcgtgtgatgtttcccatagaaagcatgtccggacgtgttttgggttttggagggcgtattctgaccaatgataaaaaagccgctaaatacttaaactcgcctgagagtgatatctaccataaaagtaaagtactttatggaatttttcaggccaaacaagcgattgcaaaacaaaataactgttatctggttgaaggatatacggatgtgattcagtttcatcaggctggaatcgagaatgtggtagcttcatcaggaaccgctttaacaccggaccaaattcgtctgatcaaccgattaacgagaaatataaccgttttatttgacggagatgctgcaggattacgtgcttctgttcgtgggatcgatttgattctggaagaaggaatgaatgtaagagtttgtgcttttcccgatggagaagatccggacagttttgcacgaaaaaattcgcacgatgatctggttgcttatttagaagaaaacagtaaagattttatacagtttaaagcctctctcttaatgaaagaagcgaaaaacgatcctataaaaaaagccgacctgattcgggatatggtcaatagtatctcgaagattccggatcgtatccagcgtgaaatttatactcaggaatgtgcccgaatcatggatatttctgagcaggtattggtgagtactttggcacaattaattcaaaaagatcttgcagaagcaggcaaaaagcaaaagcaggagcaaagaccttttgaagtacacaggaatcagcctgcaaaacagaccggttattccgggggcgatcccgaagacccaaggacagggccgcctgaggattattatccgggagaaccgtcgtatgcacaagagccgacggagaaagttgatattttataccgtttagaacgaaaagtaatcgaaatcctgctgctttatggtgataagacggaggagtttgaagatgtacttttaaaaacgaatgaagagggcgaagtgataatggtctctgaaatgaaaaattataaagtctatcagcgtatttatttgagtttgcaggaagatgaggtagaactttctaataatttgttccgtgatatctttacagacttaatcgggttttacaatcagcatgaaaaatttagtctcgagcaatatttaatgcgcctgcagcctgattttgctcaggaagttacggatattttaatggaagatgaaagattggctcttcacgattgggaaggacagaatatcttttcaaaaatgaagcatgaaacgattgcgcaatacgttaccgaaacgattatgtcaatgcgttggtttttggtaggcaaaatcattgatgaattaaaaagctctataaaacctgataattcagataatacagagcttttgtctatggttgtcgattactcaaaattagttaattcattcgcgaaaaaactaggaagagtaatgtcgcgataccattaaataatttctaaagtcttagctttgtttactaagtcaactaaattagtaacatttaatttagtcaataatcttaatttgtaagtactgattgttttttcgttcaggtttaagattttagagatttcattgttctttttaccatcgcttaaataacgtaaaacttcgatctcacgatttgaaagttttctgtacaaacgctcgcttttgctttgtttagcaataagggccatgtttttacgtacggtttcgttgatgataatttttccttcgtgtaccttaataatagaaatacctaaagtttcaagtttttctgttttgtgtacataaccggaaactcctgctttaatagcgtttggagcatacatttgttcagcgaggtcactaaaaattacaatttttgtttttgggaaattcttcaggatggattttacttcgaagatacttgaaagtccttccagttctagatctagaatcaggatatcgatttctttcgtctgaaggatatctctaaccattgaaaaattgcctacgttggcaacaattgaaatttgatcgtggtctttaaaataagacttaacgccaaagtgagtcacaggatgattgtctgcaagacatactttaatcataatttttaccttttttagaattgttcatgtttttggaactgtaaaattaataaataaattctgtaattaattgcagacaaatgttaaaaagtattattttaacgtttttggtataatacagaccggaattggatccattttatgcttgttactggtgtttaaacgtttataaatttcgaagacaattttctctctctcgctaaagtcatcccccgtatttcctgaatccgaggctaacattgcccattcaagttcgtcataactggcgcctaattgatcctcatcggtgcgattatcgccaaataatccatctgtaggtgctgcgcttaaaattgactccggaattgttaaaaatgcccctaaagcatatacatctgatttcattaagtcggcaattggacttaaatcgacacctccgtctccatatttagtgtaaaatcctaccccaaaatcttctactttatttcctgttcccgctacaagcaaaccatgaattcctgctaaataatataaagaggtcattcttaaacgggcacgcgtattggctagggataaatttactttcgcttcatcgtccgtttgaggtacagcgcttttaaaagcttcaaaagtggcggttaaatccgtttctacacttgaaacatttggaaaacgtttctttaattgctcaatatgttctcttcctcttgaaacctgattggcagcctgatgaattggcatttcaacacataaaacggttaagccggtttgtgcacacaaggtagaagtcactgcagagtcaactccgcctgaaatcccaattacaaaaccattaacttttgctcgggttgcataattttttaaccactctacaatgtgggcgtttactttttctgtctgaatagtgctttttttagccataatagttcaagatttaagatacagggatgtatatttgcacaaatatttttaagcatagtttgtttaaaatatgagcaacacaaatctaattaaaataaaatgaaaatatatcgcttagcagtggttctgtgcttgttttttttgtcttgtgaccagaaaaccaaagtcgaaaaagcagtagaagaaattccggtcgacattaaagtagagcgttttgataaggtgttttttgagactaaaccagaggatttagctaaagtaaaaaaacagtatcctttcttttttccggcaggaaatgatgataatgtctggcttaagaaaatgcaggatcccatctggaaagaagtttataccgaggttcagaaaaaatacagcaattttgagcctgtccgcgaagaattcaatgcgctttttcagcatgtaaaatattacttccctaaaacgaaaacgccaaaagttatcactgtaattggggaaatggattataatgccaaggctatatatgcagacactctggtaattgtagcgttggaattgtatttggggaaagatcataaattttatgaattcccaaattatctaaaacaaaattttgaagagaagcaaattatgcccgacgtggtttcgagtttcgcttatcgaaatatcccggcatttccggataaaaatttagtttcccaaatgatttttgaagggaagcaattgtatgcgaaagatttgttgttgcccaattatactgatgctgaaaaaataggttacacacctgaacaaataaaatggagccaggaaaatgaagcctatatgtggcgctattttattgaaagcgaaatgctgtacagcgatgatccgaaactaactacccgatttatagtgcctgctccgttttctaaattctacttagaaattgacaacgattctccgggaagaataggggcttggttaggatggcaaattgtacggtcgtatatgaagaataataacgtaactttgccggaattattaaaaacagaagcaaaggtaatctttgaaaagtcaaaatataaacctaagaaataatgtcaaatacaataaaatcagaaattaaattcaatatagaattagacgaaaaccgtgttccggaaagattatcatggacggcaaaggacggtggagtagaagcagaggaagcaaaagcaattatgctgtcaatttgggacagtaaagcgaaagaaagtatgcgtatcgatttgtggaccaaagatatgccggtagacgaaatgaaaattttctttcaccagactttggtggctatggcggatacttttaaacgtgccactgacgacgagaagatgtcagatactatgaaagacttttgtgattattttgcagagaaactggagctgacgaaataagtagttgaaattccaatataaaaaatcccaaattccaatagtaaaacttggaatttgggattttttattgattattttgggatttggaatttcctctattggggtctaaaattccgagttgtttttaaaaacctcctgatttacttcatcaatataggttaaaagatcttcttttcctgtagcttcagtagatgaagttacaaaatattgaggcatttcagaccagttattggcaaacatttgttttttgtaagctgcgacgtgagaatcgatttttactttactgattttatctgctttggtaaaaatgatgcaaaatggtatttcgctttctcccatgtaagacataaattcaatgtcgattttttgtgcttcatgacgaatgtcaattaaaacaaaagcgcaaactaattgctctcgggtttcaaaataatccgtgatgaattgctggaaaacggatttggttttcttagatactttagcataaccataacccggtaaatcgaccagaaaccaattgttattaatcttaaaatgattgattaactgtgtttttccaggtcgccctgatgttttggctaaattcttatgattcgtaagcatgttgatcaaagaggatttacctacgtttgatcttccgataaaagcatattccggtaaaaaatccttcgggcattttgatacttcagaattacttacaatgaattcggcggtattaattttcatgttttttatttttaaaacctcctaaaagtcgaaagttagatgctataaattctttttaacgagccattcttccaggattttgttgaattcctgagggtgctccatcatagcagcgtgtccacatttgtctatccagtacaaagttgaattaggcaataatttatcaaattcttcggcaacatttgggggagtaacggcatcatttttaccccagataatgcaggtttctgtggtcatctttggtaaatctttggccatattatgacgaatagcacttttggcaatcgtcaaagttttgatgagtttgatacggtcattaacggttgcgtacacttcgtcaataagctctggtgtagcaattgcaggatcgtagaaaacatcttcagctttctttttgatgtattcgtaatcgcctcttttggggtagctgtcacccattgcgctttcgtaaagtcctgagcttcctgtaattaccagtccggcaactttttcaggatatagctttgtgtggtacagtgcaatgtgaccgcctaaagagttgcctaatagtataacctgatcaaatcctttaaaagtgataaagtcttttacatacttggcaaagctttttacgtttgtttttaaaatgctttgagtatagattggcaaatccgggatcacaactttgtatccttttgttggaaaatattcggctacagcatcaaagttactaaggcctcccattaagccatgtaaaataacgataggagttccttctccagcttcataatagctgtatttgccttcttttttgtagtgtttgtccatttaatttaatgccaatttcaatttggacaaatatagggtttaataaataaaaaaggatttttgctgtcgttttttaactagataattttagtataatttataagtggttagaaatcagtatgaagtggtgttttttgtcggttttttaaatgttaagaaatcggcagaatagctaaatttttaagaaaaatagcgcgtaatttttttgaatgattagtgttattgataattcgttaataataagttaatgtattgatcttctatctgttatgcaaagtggggcgtaagtggttaaacttattaacaaagtggtacattgtggtaaaatgtggtaatattttttatatttttgtcctataacatattaatgaattttcttgaacacaattgttggaacatatgagtgtaaagtcgatgctaaagggaggctgatgttgcctgcacctttgaaaaagcaattgacttcctctcttcagaacggatttgttttgaagcgttcggtttttcaacagtgtttagaattgtatccaatgagtgaatgggatctgatgatgcaaaaaatcaacaagctgaatcgctttgtaaaaaagaacaatgatttcattcgaagatttacggcaggtgtgaaagtggtagagattgatgcattggggcgattgctggttccgaaagatttggtgaccttttcgggtatttctaaagatgtggttttttcatctgcggttaatattgtggagatttgggataaggatttatatgaaaaatcaataagcggcgaagatatggattttgcagatttagccgaagaagtaatgggaaatattaatgacgacgacaatggaatatcataatccggttttgcttcatcctacagttgatggtttagatattaaacctgacggcatttatgtagatgttacgtttggcggtggggggcattcaaaagaaattttgagacgattagggccaaacgggaaattatttgcttttgatcaggacgaagatgcgcttgccaatgcactaccggatgaacggtttaccttaattaatgagaatttcagattcataaaaaggtttttgcgttttcatggtgttaaaggtgtagatggaattttggctgacctgggtgtttcatctcatcagtttgacgttccggagagaggtttctcaacaagatttgatgccggactggatatgcggatgagtcagaaaaatgatttaaatgcttatcgggtggttaacgaatatgaagaacaggatttacgtcgtgttttttttgattatggggagttgaagaacgcgccggttttagcaagaacaattgtagaagcaagacaaggctatccaatcaaaacgacagatgaactgaaagaagttctgaagaaatatctgccggaaaaagttcgaaacaaaatactggctcagatttaccaagcgattcgaatcgaggtgaatcaggaaatggatgttctaaaagagtttattgagcagtctttggaaattttaaaaccaggcggaagattctctgtcatctcttatcattctttagaagacagactggtaaaaagattcatcaaaaacggaatgtttgaaggagaaccagaaagagatttttacggaaacttttcagttccgtttaaaacgatagggaaactgattgttccggatgaggctgagattaaaatcaacaacagagcaagaagtgctaaattaagaattgctgagaagatatagtttgtgagatgttggttgtgaaatgtgagtttgaccataagcagttaaacggtcgaacgattcaacaattaaacagattagtataatatataggtagaaaagatgaaaagtggtgtatttgatatattaaaagcaaggtttctgatcaacgatgatgcagtaaaaaactggcgtttcattgtttttattattctgcttgccattttgatgatcgccaatacacagcgttacgaacagaaggtttttgaaatcgcaaaactgaacaatgaagtcaaagaattgcgatctgaatttgtagaccgccgttcagagttaatgaagttaaaaatggaatcgacgatatcggataaaatgctggagaagaaaattttcccatccacagttcctccgattaaaatagaagtaaaaaaagaagaagaaaaaagtttctttaaaagaatatggcagtagaagataaacatatatcctacagaatttacctcgtagcagttttcatctttgtgatggcaattgctattgttgttaagttaaccaatattcaatgggtagaaggagattattacagaaaactggcgaaacagcgtaccgttagaaattttgtaattccggcaaacaaaggaaatatctattcggctgacggaagtttattggctacatctattccgaattatgaaattcgtttcgatgctaaagcgccaaaaacagagacttttgaaaaatacgtaaaagcattatccgattcattggctaccgttttagacagaccggcaggttattatcagcaggaattaagaaaagccagagccaacaaaaatcgttattatctgattgcccgcaatttgagttataccgaatatgtgaaaattaaaggttttcctttgtttaatctgggcgcttttaaaggagggataattgttgaacaggaaaccgttagaaaacatccgataggtaaaattgcagaacgaaccattggttacgatcgaattgaccctgcaaccggaatcgaagttggtaaaggaatcgaatgggcctataaaagttatctgaacgggaaagacggaaaaattttaaagcaaaaaattgcaaaaggacaatggaagcctattcgcgatttaaatgaagtagatcctgtagacggttatgatgtgatttcgaccattgatgtttttattcaggatattgcacatcatgctttattaaagcaattggaagattacgaagccgatcacggttgtgtggtggtaatggagaccgaaacggggcatgtaaaagcaatctcgaatctgggaagatcagaagacggatcgtattatgaaactacaaattacgctatagccgagtcccatgagccgggatcgacatttaaattggtcgatttaatggcgattttagaagataaagtagccgatacaagtactgtttttgacagtcatggaggagaaatgaggtattacggacgtgctgttcgtgattcgcacagaggtggttacgggaaaatttcgctggcacgaggatttgaactttcgtctaataccgtaatggttcaggctgtgtatgacaattacaaaagcaatccgtcaaagtttgtaaatcatattaattcgtacggattaaataaaacattaggattgcattttaaaggggaaggaaggccatatattccacaacccggagacaaacactggtcaggagtttcacttccgtggatggcttttggttatggagtttcggttacgccaatgcaaacactggcgctttataatgccgttgcaaacaatggagtgatggttaagccacagtttgtttcggaaattaaagaatggaacaaaacgattaataagtttgaggtagaagttatcaatccgaaaatatgttcgcaggaaaccatcgacaaagtaagagcagtattgctcaatgtggtaaaaaagggaacgggctctaagctgtattcgaaagatttttcgatggcaggaaaaaccggaacagcacaggtgaattatggtggaaaagaaggaaaatcaggcttgtattatgcctcttcatttgtggggtactttccggctgaacatcctaaatattcttgtatagtagtagtgcataagcctaatacatcaaaaaacaattattacggagcagatgttgccgggccggtttttaaaagaatcgcccaaaaaatatttacagatgcaccgtcaaccaatagaataaaaagactggattcaagaattccaaaacaagatgacagttataataaatatacggcagaagccaataaaaaaataaatcaggttcctaatttaaaaggtatgccgggtatggatgcagtggcattattagaaaaccttgatttaaaagtgagagttatcggagtaggaaaggttaaaaaacagtctattcaacccggacaaaatattagtaaaaacacaatcatagtattagaattatcgtgaaaatactgaaagacatattatacaaagtagcgattgagtctgtaacaggttcaacggaaatcgatatacataaaattgattttgactcaagaaaaattgaggcaaatgatgttttcgtggctattcgcggatcactttcagatggtcatgattatattgaaaaagcaatcgaattaggtgcaattgcgattatttgtgatacgctacctgaaaacattgaaaaaggaataacctatataaaagtaaaagatactaatgcggctctggcttttatggcagccaattacttcggaaatccatccgaaaagttaaagttggttggagttaccggtacaaacggaaagactaccattgcatcattgttgtttcagttgtttcaaaaagcaggttttaaagttggcttattgtcaaccgtaaaaatcattgtcgatgagactgaatttcctgccacacataccactccggattcgattacaatcaatcattatctgaatgaaatgatcgaagcgggtgttacgcattgttttatggaagttagttcacacgggattcaccaaaaacgaacagaggcactgcattttgttggaggaatttttacgaatttgtcacacgaccatttggattatcacccaacttttgcggaatacagagatgtgaaaaaatcgttttttgattctttgcctaaaacagctttcgttttgtctaacatcgatgataaaaacggatcggtaatgctgcaaaatacagtagccagaaagtttacctacgctttaaaaacgtatgccgactttaaagcgcagattctggagagtcagttgtcgggtttattactgaaagttaatgataatgaagtttgggtaaagctaatcggaacgtttaatgcttacaacgttttggcaatttacggaacggctgtagagttaggaatggatagtctcgaagcgttgcgcttactgtctgatttagaaagtgtttcggggcgttttcagtatatcgtttcagaaggaaacattacagcaatagttgattatgcacatactcccgatgctttagataatgttttaaaaacgattaatgatatccgtaccaaaaacgagcagctgttaacagttgtaggttgtggtggaaacagagataaaaccaaaaggcctataatggcaaaaattgctacagatttgagcgataaggcaattttaacctcagataatccaagaaatgaagatcctgaagtgattttagatgaaatggagaaaggcgttgaagctcacaattataaaaaaatattgagaatttcagatagaaaacaagcgattaaaacggcttgtcagttggctcagcccaatgatattatcctaattgcagggaaagggcatgaaacgtatcaggagataaatggggtgcgtcatcattttgatgatatggaaacggtaaaggaaattttagaacaactaggaaaataaaagtttaatcgatgaattgattattcgtttaatcgaataattattaaatcaagaataaacgaataaacaaatcaacgattaaccaaataaacaaagatatatgctatactatttatttgaatatttagacaaaacattagatgtaccgggaacgggtgtttttcagtacatcactttcagatcggctttggcatttatgctttcgttgcttttgtcaacgatttacggaaaaagaattataaactttttacgtaatcagcaagttggtgaaaccgttcgtgagttaggtcttgcaggtcaaaatgaaaaagcaggaactccaacaatgggaggactgattatcatttttgcaacgctggtaccggttttgttatttgctcgtttgcataatatctatatcgtattgcttattgtaacgacgctttggatgggtagtattggttttgtggacgattatatcaaaatattcaaaaaggacaaacaaggacttaaagggatttttaaagtgatcggacaggttggtcttggaatcattgtgggatctgttttgtattttaatcctgctgttaccgttagaaccgatacagggagaaccgatgtttttaaaacagctacgaacaattcaactatagttttgccggcaccagtagaagaaaaatctacagcaactacaattcctttcgtaaaaaataatgaatttgactatgctgaagttttagcctggacaggtgaagggtatgaaaaatgggcctggctgatttttattccggtggttatttttatcatcacagcggtttctaacggagctaatttaacggatggtattgacggactcgcggccggaacttcggcggtttctgtactcgcactcgggatatttacattcgtttccgggaatattattttctccaactatctgaatataatgtacattcccaattcgggagaaatgaccgtgtttatatccgcatttgtgggagctttaattgggtttctgtggtacaattcatttccggcatctgtatttatgggagatacaggaagtttgaccattggaggaattattgctgttttagcgattgccgttcgtaaagagatattgattgttttattctgcggaattttccttgccgaaagtgcttccgtaattattcaggtgacttattttaaatatacaaaaaagcgtttcggagagggacgaagaattttcctgatgtcaccgctgcatcatcattatcagaaaaagggatatcatgaaagtaagattgtgacccgcttctggattgttgctgtaatgttagccatattgtcaatcgttactttaaaactaagatagttttgaattaaaaattgagaattaaaaattgaaagttcttagaaaggaaagaaaatattattcagggtaaatcctttcttttcgcggttagaattgtcaatttatataaatatctgacggccgaaaagaaagagtttgttttgagtaagcagattctaagatgtgggacctctattggagccaacatcgaagaatcaatcggaggatgttctgataaggagtttctgtttaaactggaaatctcatataaagaagcaagagaaacaatttattggttgaaactcttgaaagcaacagattatatttctgcagttgaattcgaaagcattcataaggaagcagaggagatatgtaaaatattagcgaaaattatattaaccttaaaagggaaaaatgcaaataattagaggtcttgagtatagcagatttttaatttttaattctcaatttttaattttataaagtatgaggttagtggttttaggcggaggagaaagcggcgtaggtactgctattctcggaaagaaaaaaggatatgatgtttttgtatcagattttggaaagataaaagagagttacaaagaagttcttatcattaataaaattccctgggaagaagaacagcataccgaagatctgatcttaaatgctgatgtggttatgaagagtccgggcattcctgaaaagtcaccaattgtaaagaagttggtagcggccggagtaaaagtgatttcggaaatagaatttgcaaaaccttttaccgaagcattgactattggaatcacaggtagtaacggaaaaacgactaccactatgctgacccattatttattaaaatcagcaggtttgaatgtaggtttgggagggaatataggaaagagttttgcctggcaggtagccgagaataaatacgatgcatacgttcttgaattaagcagttttcagttagacggaataatagattacagaccggatattgcgatcataaccaatatcagtcccgatcacctcgatagatatgaatataaatatgagaattatatcaattcgaaattccgaataacgatgaaccagaccgaaagtgattatctcatttatgatgcagatgatgaggcaagtacagaatggttaaaaaacaacaaaacaaaagcaaaattaattcctttctcattgacgaaatcattcgatgaaggagcttctataaataacaacaaaatggaaataaagatcaaccaagaagagtttacaatggacacagaacacattgcgttagaaggaaaacataacatgaaaaacgcaatggcagcaagctctgtagcgaaattgatgcaaattagaaatgcaacaattcgcgaaagtttatctaattttcagggtgttgaacaccgtttagaaaaagtacttaaaattcagaatgtacaatatatcaacgattcaaaagcaacaaatgttaatgcgactttctttgctttagacagtatgaacgttccaacagtttggattgttggtggagtagataaaggaaacgattacaacgaactgatgtcattagttcgcgaaaaagtaaaagctattatttgccttggaattgataatcataaaattatcagcgcctttggaaatgtggttgacattatggtcgaagtaaataacatgaacgatgctgtaaaaacagcacagcgtttaacagaaaaaggcgatgctgttttattgtctccggcctgcgcaagtttcgatttattcgaaagctacgaagatagaggaaggcagtttaaacaagccgttcacaatttgtaattttagatttatgagtttagattttagatttttctagactttaagattaatgaatttttaagttctttttgattatgacgacggatgaaatgaagttgagaacaaaaaagttctctttgatggtgattgatttagctgagaaaatgccaagtacaaatgttacgagatcaattacaaatcagatggtaaggagtggaacatcagttggagcaaattatcgggcagtatgctgagccagaagtgataaggagtttgttgctaaaatgaatatcgttttagaagaagcagatgaaactttattctggcttgaaattataagagaaaaagaatggatcgataaatctgaattagaaatagtttggaaagaaggtaatgaactgacggcaatttttgtcagtagtttaaaaacagtaaataacagaattaataaagagactaaggtttagaaaaatctaaaatctaaactcataaatctaaaatagcattatgaaagagctggtgaacaaattaaaaggagacagagtaatatggtcattcgtggctttattggcattgttttcgtttatgcctgtttttagtgcgagtagtaatctggcctatatcggtcatgggaccggaaatacattaggttatttagtgaagcatttggctcacgtttgtattggttttctgattatttactgggtgcatcgcgtgccgtatcactatttcagggcgatttcgaaaattgcactgcctatagtgtggtttttgctgctttataccttgttgaaaggaactgttattgcaggtgcaaatgcgagccgttggattcaggttccttttatcggaattacgtttcaaacgtcgactttggcggccagtatattattcatatttgtggcgcgttatctgtcgaaaacgaaagaagaaaatgaaccttttcaggtatcgctgatacagctttggctgccggtttttataacactggcacttattttaccggcgaacttctcaaccacagcgttgatttttgcaatggtaattatgctgacatttattggcaggtatccattaaaatatattggttttattatcggttccggaattgccatgtttgcgttcttccttttggttgcaaaagcattcccggattccagattctttagcagggttagtacctggggaagtcgtattgaaaactttaccaccgacaaaccggatgaagatgattatcagattgagaaagcaaaaattgcaatagcatcaggaagattaggaggagtaggtccgggaaaaagcgttcagaaaaactttttgccacagtcttcttccgattttatttatgcgattattgtagaagaatacggtttagtaggtggggtagcaatattgattttgtacttattattattgttccgatttgtgatcgcctcacacaaggcaaatacattatttggaaagctcgtcgtcgtcggacttgggtttccgatgatctttcaggcaatgatcaatatggctgttgcagtggagttgcttccggtaacagggcaaacacttccgttgatcagtagtggaggtagttcgatttggatgacctgtttctccctcggaattatcattagtgtgacaaaaaaagaagaagaaattgccgaagaacaggaggaaaaagaaagaagaagagaagcccttcaaagattaattgataaagaattagcagaagaagatctgcctgctgacgaaaagatatacgaagaagagggattgtattccattgaagacaattccagaaatccgatgaatgcagttttaaataagtaagaatagagctgagagaatagaggaaagagaatagaggaaagagaatagaggaaagagaatagaggaaagagaatagaagaaagagaatagaagaaagagaatagaagaaagagaatagaagaaagagaatagagaaataggttgataagtattgagagaactcacaactcataactcataactcataactcaaaaaaaacatgacaaaatataaattcatattaagtggtggtggtacaggagggcatatctatcctgcaattgctattgcaaatgaattaaaattacaattccctgacgctgagtttctttttgtaggtgccaaagataaaatggaaatgcagaaagtgcctcaggcgggttatgaaatcaaaggactttggattgcaggtttgcaaagaaaacttacgttgcaaaatttaatgtttccgttaaaattggcaaaaagtttgctggagtcacgacgaatcataaaacaatttaagccaaatgttgtaattggtaccggaggttttgccagcggacctttattaaaggcagcaggttcggccggaattccaacagtcattcaggaacagaattcgtttccgggaattacgaataaactgctaagtaaaaaagccaatgcaatttgtgtagcttatgatcatctggagcgtttttttccaaaagaaaaaattgttttaaccggaaatccggttcgtcaggatctcattgatattgacagcaagcatgatgaagcggttgctttttatggattagatccgaataaaaaaacattgttggttttaggagggagtttaggagcgagaaggatcaatcagttaatcgaaaaagaattgcaaaattttctttcgcaggacgttcagataatctggcaatgcgggaagttgtattttgaagaatataaaaaatacaatcagcaaaatgttaaggtagttgattttattgaaagaatggattttgtatatgcggctgccaatgtgattatttcacgtgccggagcctcatcggtttccgaattgtgtattgtagggaaaccggttatatttattccgtcgcctaatgttgctgaagatcatcagactaaaaatgcacaggcaatcgtagatgctaaaggagctattttactgaaggaatcagaattggataatgaatttagtattgtttttgaagccttgcttaaagatgaagggaagcaaaaacaattaagtgcaaatattaaaaaattggcaaaaccaaaagcgacacaggatattgtagcagagattgtgaagcttattcagctataggctataggcagtaagctttaagcttgccctaaagcttaaaacacaaaagagaataaataataaacacaaaaggttgagtgcttaaagcaagaaaagaataaataataaacataaaggttgagtgcttaaagcctaaagcctattgcttaaagcaagaagagaataaataataaacacaaaggttgagtgcttaaagcctaaagcctattgcttaaagcaagaagagaataaaaaataaagacaaaagtggaaggcttaaagcctaaagcgtaatgcttaaagcagaaaaaaaaagcaaaagaaaaaatgaatttaaatcaaatacaaaacgtttattttattggtattggaggcatcggtatgagtgccctggcccgctattttaaaaatatagggaaacaggtttccggttacgataagacaccatctatgctgacaagcgagttgattgaaagcggtattgatattcattttgaagataatattggtttaattccaaaggactattatattgagaatacactggtgattattacaccggctgtacccaaaacacatgctgaatggaattattttacagaaagagattatgtggttaaaaaacgtgctgaagttttagggattatcactaaagatacgttttgttttgctgtggcaggaacacatggaaaaaccacaacctcaagtattttggggcatatactgtatgaaagcggagcagatgtgactgcttttgtgggaggcattgtagagaattacaattcgaatttaattggagaaggaaaaacggttaccgtagtggaagcagatgaatttgatcgttcgtttttgcacttgcatcctaatattgcctgtatcacttcaatggatgcagatcatttggatatttacggaaccagtgatgcaattgaggcttcgtttgtagaatttgcttcaaaagtagaagataaaaataagctgtttataaccaaagaattacctcttgaaggagttcagtgtgctataaacgaagaagctgtatacaaggcttttaatgttcgtatcgacaacggaagttatgtttttgatgtgcagacgccagcagaagtgatgacagacctgcgttttggattgccggggaaacacaatttaatgaatggactaatggctattgcgatggctaaaacgttcggcaccccgaccgactccattgcaaaggccattgcttcattcaacggaatcagaagacgtttttcgtatcagattaaatctgaaaatttagtgtatatagatgactatgcacatcatccaacagagctaaatgcagtacatcaggcagttagggaattgtatccgggacgtaaagtactggctatttttcagccgcatttattcagcagaaccagagattttgccgatggattcgcggagagtttatcagcatttgatgaagtgtttctgatggatatttatccggcacgtgaattaccgatggaagggattacatcagaatggctgttgggaaaaatgacaaattcgaacaaaaaaattgttgcaaaagaggatttattagcggagatcaaagccagtgatgcgccaataattgtaacaataggagctggtgatcttggtgagatggttccttcaattaaaaaaatgctgaatgaaaatatttaattggacaaatattcgtttgatactcatttttgggttggttatttttttatattccttcgctcaacatcgaaatggagatcgaaaattaaaaaaatccacggtcgtttttgtaggagaaaacaccctgtttgtaaagcctgaaacggttaataaattgttgatagaaaataaaaaagacgcttccagtattagaaaagatgaattagatttgaataagatagagaaaaccctcaatgcgcaagacatgattgaaaagtcagatgtttttgtaagcattgacggcgttctaaaagcagtagtaaaacagaagacaccaatagcaagagtttatgatggtgatcgatctttttatattgactatgagggtaataaaatgcccttgtcggacaattatactgcgagagttcctcttgtttcgggggcaattaataaaaaaaataacgaagatttagctgctttatttcgcacaatttatgacgatgcgtttttgaaaaaaaacatcattgctatacaaattatgcctaatggcagcttaaaaatgtttaatagaaactataattacttcatcgattttggcagaacgatgaatgttgataagaaatttaataactataaagccttttttcaaaaagcggttttagatagttcgttatacaaatacaataaaattgaccttaggtttacggaacaagtagtttgcacaaaataatagaaaatggaaaaagataacattgcagtaggtctagatattggaacaaccaaaatagttgccatgataggcaagaaaaatgagtatggtaaactggaaattttggggattgggaaatccaaaagtttgggagtggcgagaggagttgtaaacaacattacgcaaactattcaatcaattcagcaagcaatacttgaagcagaaaataattcaggttataaaattaaagatgtggtagtaggtatcgccggacagcacatcagaagtatacagcataccgattacatcagccgtaataatccggaggaagtaattggcgaaaaagatattcagcttttgatcgatcaggtaaataaactggcgatgttaccgggagaagaaattattcacgtcttgccgcaagaatttaaaatcgacgggcagtctgagattaaagagccaatcggaatgtatggcggaagattagaatccagttttcacgttgtagtggggcaggcttcttcaatcagaaacgtgggaagatgtattcagagttcaggaattgaattgtccggattaaccttagagcctttggcttctgcggatgcagttttaagtcaggaagaaaaagaagccggagttgcgttgattgatattggtggaggaacaacagacttagccatttttaaagatggtattattcgccacacagcagtaattccttttggaggaaatgtaattacagatgatataaaagaaggctgttcgattatcgaaaaacaagcagagcttttaaaaataaaattcggatcggcctggccgggagagaataaagacaatgaaattgtttctattccgggattaagaggaagagagccaaaagaaatttcgcttaaaaacttatctaaaattattcatgcccgtgtggtggagattgtagagcaggtttttgcagaaattaaggcttacggacacgaagatccacgtaaaaaattaattgccggtatcgtgcttacgggcggaggtgctcaactaaaacacatcaagcaattagtagagtacattacaggaatggatacgagaattggatatccaaacgagcacctggcaggaaattccagtgaagaaatctccagtccgttatttgcgaccgcagttggtttagtaatgaatagtatcgagaatagtacgcaaagtgctgttagaatggagattgtaaacgatcagccaaaagtggtttacagaaatgtaccgccaccgatacaacagccggtgcaacagcgatacgaagttgaagaaaactacgttgaaagagtagaaactatcgaagaaaccagagaagttagaaacagcgtctctaaagaagaatctacagaaacaaaaatcagaagatcattttttgaccgatatgtcgataaaatcaaagattttttagacaacgcagaataagataataaaagaaaaggattactttattggccccaagtcaagaagtaaaaaatgtattaaataagaatttcaaaaaccaaaaagatgatgagcaactcagaatttggaagtatttcatttgatttaccaaaaaaccaatcaaatgtaatcaaagtaataggtgtaggtggaggtggtagtaatgctatcaaccatatgtttaaacaaggtattaaaggcgtagattttatcgtctgtaataccgattcacaggcactgcagaacagttcggttcctaataagattcagttaggaatgaacttaacagaaggtcttggtgcaggagcaaatcctgatgtaggacagcaatctgctatagaaagtatcgctgatatcgaaaaaatgttagaccgtggtactaagatggtatttattaccgctggtatgggtggaggaactggtacaggtgcagctccggtaattgcacagttagctaaagaaagagagatcctgaccgttggtattgtgacgattccttttcagtttgaagggaaagtacgtcaggagcaggcacttttaggaattgagaaattgcgtaagcaggtcgattcattaatcgtgatcaacaataataaattaagagaagtatatggaaatcttggttttaaagccggattctctaaagcggatgaagttttggcaacagcctcaagaggtattgctgaagtaattacgcatcactatactcaaaatatcgatttacgtgacgctaaaactgttctttcgaatagtggaacggcgatcatgggatcttctgtggcagagggcgagaacagagctaaggaagctattatttcggcattggactctccgttgctgaacgataataaaattacaggagccaaaaacgtattgttgcttatcgtttctggatcaaatgagattactttggatgaaattggagaaataaacgatcacatccaggtggaagcaggttacaatgcaaatatcatcatgggagttggtgaagacgaagctcttggtgatgctattgccgtaactattattgcgacaggttttgatgttgaacagcaaaatgatatcgttaatacagagcctaaaaaaatcattcataccttggaagatgagcaaagaagtgttcataatctaaccaataagtcagttacttcttttgatttaacaattgatacaccaaccagtaaatcagaagaaaaaattgtttttgatttaatggacgatgaagacacggttgctcccgtaactcccactccggttgtaccagttgcagctgcaccatttgaagttgctccggtggcagttgctccagcgatgaatcaggaagagttagtggtaatgtctgagtttatcaaaaatttggatgttacgtttgaaattgtttcgccgataaccgatatcgattttacgattacgagtccgcaagccgaagcttttcaggatataaaacctgttcagcaagtgcagcaaagaacattcgaaagagaagagcaaacgacattctcctttgatttgccaattttcagatccgaaccagaagttaggaaagagccagttgttgaagaaactaaagttttattcgaattaacaaacgaaacccgtaatattaaagtaaatgatccggtttcatttgtaccggtaaccgagctttctgataaaggagttatcaagtattctttagaggaatacatggaagttgaaaacgatttaatgacgtcaaaaccggttgaaaaagtggtagaagaagtaattcctgcagaattaaatatcaccatgaaaccaagacctgatttcgctgttgaaccggattactccacaacagcaaatgtgtctccgatggaattgacaattgaagagactttacgtttaagagcagaagaaagaagaaaaaaattaaaagaatttaattataaattccataataatgtgtccagaattgatgaattggagaaagagcctgcttacaaaagattaggtatcgatttgtctaattcacaagcaaacaacacaaactcaagaatttcggttggaacagacagtaacaacgatttgcaattgcgttcaaacaattcgtttttgcacgacaacgtagactagttttaaaatcataataattggataacccgaaaattggatttaattttcgggttattttttttatcttcgcacagaatttaaaatttgacttcccaaacaggtttttaaagtgaatcttattagtcagcttaagcgaaggagaaaatataattttaaaggtaatcgatcaatctataagccttggcttatttaaataaaattagaaaatgagtttacaaacactaatcatggacgagattaaaaccgccatgaaagcgaaagatacagtaagtttagaagcattaagagctattaagtctgaaatgttactggctgcaacggcttcaggttctaaagaagaattaacagaagacgatgaaattaaattgcttcagagattggtgaaaacccgtaaagaaagcgccagaattttcacagagcaaaatcgtcctgatttagcagagcctgaattggctcaagtagctgtaatcgagaagtttttaccggctcagttaagtgaagaagaagtagaagcagtagtagcaaaaatcattgctgaaactggagctgttggaattgcttcaatgggtaaagtgatgggattggcttctgcacaattgggaggaacagctgaagggaaaaccatttctacaattgtaaaaaagttattatcgtaaataatttcatgatttcagagtttagttcagaatttgaactctgaaatcataaatctaaaatctaaaatcaaaagacctcgtagttcaactggatagaatatcagatttcggctctgagggttgggggttcgaacccctccggggtcactattaattttaaaagcctgagaatgtagattcttaggcttttttttgtggttctattttttttgagattttattagagttttgtaaatgcctatattctacggagatttcggctcgaaccccatcatgggctgttaagttttttgattcttttttagggctttatagttaaggtttaatctcaaattgaactctattttagattagcacatctaatccaaataaaaaagcattttcgcattaagcctgttgcccaaatccgctgtagtagcttctggcgttacggtattataatggaactgatatttttatccttattttttaagtatcttctttacgcgattctgctgacaaagataattttcttatttcaatatcaatatttctgatatagcgtttctatagataaactgttgcgattcctaaaaaaatggtaattataaaggagtaaatcgttaacgtcgcaaattgtttacataaattatataattcgtaaagattcgcatcttgtaaattttcaaaatcctcattttttgtaatataccctatttcaactattttacctcggtcatatatatttccataattaataacatatttttcaaacaaatcaggatgtgtgtttttaagtgctgtactaaattcgtgtactttgttgtatgaacttaaagcaaaaacagggaaagttggaattgcaaaaatgattggagagaaattcttaattggctttggaaatataaataaccaaattatgttaaatatgagtattgaataaaaatatatttgaattttggatgatttgctcatgctataaatttaggatttaagattagatttttatttttttcagtttggtgtctaaagaaattaaatctgttagattatttcctgcgtaaacgcggcttcaactgactgtcgacgtactgctgctacaccaggtttggggctaaatgaaggcctgttttcagatttctaaaacatcccaaatacaagaacatttttccagtaaccgtattgtctaaattcgttgtagtagctgttatgtggcgttttttattaattcttctatttcagaatccgtttttatattttttccttttaatgtaaattgatataaaagaggctctgtcgaaatattttcaatatagcttttctccataagtaagtttaggtatctaacaacttcctttttagaattattggtcatttttgacacttcgaatattaaattccccatattttgtatttgctctgtacaattgtttgattgtagccaaagcatttcaaacagacttttcattgttttagaacgcaattgatcactttccaattcttcaattatattgtaagtttcgtctaagaattttttatattttgactttgaaacaccaaataaccatcctgttttaggtttgttttcaattctataaaatagagcccgtatcttataatcattttcgaaatttgggaagttatcaaataagttacatattgatatttctccgttaaaatattttctaacaagagaagctgctaattgtctatcttctttattgatatagtctgtcataaataacctagaactaatatatgcatctcgtctttggtgagcgaatttaagtttgctgcccgcaccggtttcttagggctaagtgtgtatatgaagttgtcatcactgaaggtctgggcggttaggctaaagcttgctattaataataaaacaaactgtactatatatttttgcatactagtgcttttttttctgttcttgtttttataaagaccatctattattggtttgtaaacgtacatttcccttttagattggcatacgcctgtccatctgcctgtgcctgcctgtcagcatcttcctgtgaaatacgtgaagtatatttccccgcgggaacggtataacttacttcagatccatacttgcctggcgggcaattgtttttccaaaaagagcctccggattcgaaatttttaaaagtgcaatatccttcgctattggctttactttgcccatctgcattaaactttcgcaatcccaactcatctgcttctgcctgagaattacaaaaaaaagctactggtccctgactgtacgatacactggaaggtactccgaatcgatcacaatattctttggtaaatgaaccactaaaaggcatactataaaaaatacatctaccattggcattggcattagcctgaccctctgtattgaatctggccaatcccttactatcagcatcagcctgtgaagaaaaagagtactccactccataagactggctataggcaacacttgagcctgttcctcccgcagcacaattattcctggtaaaagatccgcttattgcagcgctgttaaaggtacatttaccattggcattggcattagccaatccattggcgttgatttcattccaggcccgatcatctgcagcagcctgagaatcataagaatcgtatcgccctgcaggaactgtataccaaaccgtctcgggtgctccgcctgcagcacagttgtttcgggtaaatgccgcgctttgagctgtattccaaaatctacacctggcattggcattggcatacgctaatccatttgcattaatatcattctgagcctgagtatctgcatcagcctgagaactttcagaggaatgttttcctgccggaacggtatataaactactttcgggtgtcccccccgcagcacaattgtttctggtaaaccaagcgcttttggcagtatttttaaagacacatttaacatccgtattattgtctgcataagtctgtccgtctatattgaactttctgagaccattttcatccgcatctgcctgtgaaatggtcgaggtaaccacccctctcgcctgattataggccacactttgacctgttcctcctgcagcacaattccttttggtaaacaccccgcttctggctgcgcttttatagaagtactcgctggttgaagtattatcactgcaatcagtttgctgccctttaaaattgtagcaatatttttgaactacatttagatcctgatcctttacaaatttcaatcttcccaaagtatcatattcataataagaaggtatacctttgggatctgttatacttgtaacaccaagcagtggattgtaagtgtaagtagtaatcataaattgagggaaagaagtccttaaagtttgcaggttacttctcaatatttgctcattacaatcctcagtcaaacaattatcatcgtctaaatcagatcgattctgcagattcaaaacataactggcaatctgatcgtaactggcgttttctacttttgcaataggttgtgttttattgtacccccaaattatagccactggtaaacctccctcaacagtatattgtaaaatattacccttttgatcgtattggtcgtaggtaatttttttatcatcgggaatacttatgttctgagcccctttgtttgcataaacatgttttggcagtagcaaattagcggttgaagcctcattgctatatgctgttttctgttctgctattttttctccattaaaactttgtgtactcatcggtttgctaaccatgttcttcgcaatcaattcatttcgaaaagactcatttgtcatttcaggatctgtaacataaaaatattttgtctctaaattttccccttcagaatttgttgtaacctgatttttaagatttcctgtttccggatcatgggaattgactgtcttttgtatcactgttttaccattcagatagcttgtgtgctcttctttctccaaaaaataatttttagattcatgtgtaaatgtttcggttacaaaatcacttaatggtctttgtggcataggtgaacatgtcatggggccatttattagattagatccataaataccaaatgtaatgcgggtaggtttgcattctaaacccaggataaacctgcgattgttgcgttttacattatttaaataggtatttttttgtttttggatcgtatctcctgcttttgactgaataattttttggtccagctgacccaaattatatccatcatcatacagaaaattaacacttcctcctgaatacaaaaacacggttcttccgttattttgaagttgattcccttcaatttgttctaccttttgatacaataccgggcttcctctaaaattagacaagggagcaacactgttgtaactataataagatgctctactgcttacatctccaatagaagacaaacaaccagctttatctgtcaaaaaggatcctgagaaaaattgtggtttttgcagcatgataccggtacttttatccgattgcgaatagttgtaagcagtcgtgatgcaagccccgttaaaatcacagttttttacttcttttacccgcattcctcccacagtttggttaaaggtctgtgccgattgctgaagtgtggtggctatatgcgctgtagatcccacacttgatatcgcccttaaataatacttgccgggcgtgtttattgtaactgtagtttgattgacaaatgaggcttgtgtaggttcccatcgtccatcctttctccaggtctggcttcttataaaaattggattcgattcttcaccttgtttaaatagtttaactatagaaatcctgtcttcccagccgttttttcctgtatcattagacagtacattataaagatttaatgttacaggaaccgaaattacgtcgaattcagtaggttcgggttctacaatatttgttgtggttgctgataaaggtttagaggagttggagtcattagggtatggaaaattataatcggtcacattcataaaaaccgaattgggctcgtattcaattaatgaatagccctttgtctgataggtgatttttttaagacttccaatcttagtactggtaaaacttggtttgattcccggattgtctaagggatttagcggcgcattattaagaggcagtgaaccattggagttgtagtagccccataaatctttttttgccaaatcactttcagaaaagttaggataagccaaactttcatcatattccatgctattaatgacctgtccattgtattttacatttaacagattctttcttcttccggaccattgtgaatagttaaaatcataagttttaaccgtgattccggctctgttttttatctctaacttagtgacaacagctaccgcacgctcagcagggttatcatcgtattgcaattcgatcgtgtaattatcggttgtaattttagaaagtttggtgaccgatgcatttgtttctgtcctcgtttttgttgtagaccaattattatggccattcataattgtgttagtggaagtataactgtcataaatatcatacagcgtgtttggagctgtgtaattgaatgtaattttgttactggtatacggaaagttgatctccgttatcaaaaaagaagaattatacccatatccctcaatacttgaaccggtatttgtgttcatttgaggtaaaccgaaaatataatttatgcctctgtcgtcagttaatgtaaatcccgaagagccatttttaaccagtttgtaattttcattcttcatgaagatcggattatcattcttatctaaataaaaattacagctaatatttccaatattaatagagtatttgtcgggtctgccatctattcttccttctgctattttttcatacagatctaaaattctggcttttgatgctggtacattctcatcctgatacggaggcagcttgttaaaatagttgtgcatcatgcttctgtcgagttcatgcccttcatcatttagtcctttaatcgtatgcataacagctccacctacgttaaaagtccagcccactccggcatatccgggagtttcatctaccaaaagaccggaataattataggataggttaataggcatggtaaattcgccttccttaatttcgaatatcggaatggtataattgattcttcctgtggcaatatctacaggtacttcgtttactttactcatagcggtcacttgtggcgttgctatactaatattgggaatataagattttttggctccatcgtcggtttgagatttcgcattttgagtattcaaaaacaaaacgaggaacagcaagtgatatatatttgatttcatatggatttgtaacttgatataataattaaaaggctcctgaattatctaacagatttaatcacttttacagattctgttttcacatctgttctgactttgatgatgtagattccctcagggtactggcttagattaacgggaacggtcctgctgttgatgtcaaactccagtaaggtccgtccggcaatatcgatcagtgtgacggtgccttctttaaaatcataaccgatgataatgttggtatagcttgaagcaggattaggaatgacttcggtactggattttaccttttcgacttttgttttgtctttgagtttcaccacccaaaaatcattacctcccatactgccgtttttatctcttgaggctgccgaattggaggttcctgccatcagatatcctccgtctcgggtttcgattaacttcctaaggatatcttctccggcgctgccaacggttttgttccagatttcttcgcctttgtcgtctattttcatcgcgatgtaatcgttgatgccttctttttctttactgacagcgttaagtgctttggctacgatcccttcacgcggacgcctgctttcgctttgcgcataaccgcctatgaggtaactttggtctttgttttctaccaatgaggttaagatgtctgtttttccaaaatcgtaggttttactccataccacacctccgtctttatcgagtttcaggatccagtagtcggttccgtttcctacgataccgcccaaagtggtcagggcatttttgctgttggagtttccgcccgcaatataaccgccatcggcagtctgatgaatcacataaggctgatcatctccctcagctccataggtcttttgccattgaatttcaccggtatcatttattttaagaatccagtaatcacctattcctttgttgttttcggttttatcgcctgaaacaggcgaattggaatagcctgccagtatgtatccgttgtctgtggtttgttccatactcctcagcacatcgctataacttcctccataggtcttttgccattcgacatcgccctgttggtccagtttaacaatccagtaatccatattgccacggcatttatctgatttattaaactgagacgcttttgtggtgggtttggacattccgtttgtagcagcaagtgcattacctgaataatccgaactggatgaacctcccaacatataccctccgtctttggtttgaaaagcacataagagttcgtcttttcctttaccgccaatagttctttgccattgttcagtacccgatgcatctaatttgatgacccaaaaatcagtaaggcctttgcatttttcattcttttgaaaacctctccccgaatctgaagttcctgccagaatgaagccgccatcttttgtatttttaatactctgaagcaaatcaaatccgcttccgcctatgcttttctgccagaccagatctcctttttcgctcattttccagatccagtaatccagatctccatgattgtcatcgtctttatttccggttttattagataaggaactacctgccagaataaagccgtagtcggctgtgggctgtgcgtcaaacaaataatcggcatgctgtccgccgtatgatttctcccagagaatgtcctgagaataggcaaagaatggtaaaattaaaaagggtaataggtgtcgttttttcataagatattccggtttagtcttttgggtaatcaaattaagaggccaaatctaacactctgttttatattttctttacggctttccacattccgctgatatttatgcaaaagttatcccaataaaacaaactatagtcaacaaattcaacaaatgacagcattcatgccataaacggacttatatataaaacaactgcaaattttgattacagaatcccctattgttagtcacaaattctgaatgaccaggagaaccttcgtcgcttttttaaacaaaaaaaatgtgcaatgatcaaaaatcattgcacattataaacagtaacgccctacagcactatgttatctgttaaatcggttataggctattaactcacttcctgcttgtcaacatttattgtaagttactctttgtgatgcggacagcccgaagcctcccccgaagatcccattttataagttcccgggaattgctcttctattaatcgtttctgatcaggtgatacatcttccattttacgaagtgtattgacttgtatgtgtggccagcttgtcgtaccgccatcgtctccgaaatcaaactcgaaaaatatgacctgctcgtattgcaattgaagaatttcttttttgttttcgacaacagtttcaatccacattctcatgttcatttcgactgtaggaacaaaacgattgacaaacggaacatttaggattcctccctgagctccggttttatttttagaggacatctcgatcagtacatggttttttaccacatcacttttaagcgtatcccgaagacgtaaatctggccgtaccgaataaggatataaaggatgggctaatattctctgcgtatagattttattttcacgttcatcgtttttatcatccaacgtctcaaatacccaaggtggtggaggtgcatccagatttataggctcattgctggcatctgctcctcccattgtttgcgaaatagaaagatgtttatagtcccagtccgcgaatccttccgggtactgcggagcgccattaatcaaataacccgatttatttggctttaaatctcccagtaaagtaattgtacttccatggggaattacaccacttctcgaaatcgaataatcgggtataaaatatggtccggtttgccctgctcctgctttaagttcttttgaagcaataatctcgtaatattttcttccgtttaagttttccagcgtcacatattctttgtttccctgatcattcttgattaaaaacagggtttcgtcctgataaccgcttttgtataaatctttattcgggttcttcggtgatatggcatgaataccgcggtcttcactaatcgttttttctgttgccgcatagttaaagatatcactcagccacaggtacatcccattctcttcgtgaattggagtgtattgcaaagcctcctgaccggctacacggtttacacttttgatgctttgttcgtatttcaccgctccgcaaaactgctcgtttgcaccgccacggtttcgaacaccacccggcaccagattaaaagtaagtttttcgatatattcttcgcactcaaaactgtattttccgggaatggttcctgcgttagtacccggagaaggcatgatggtggtatgtataccgctgccaatgagttttttctgactctgattgtcactgttattattgtagcttacccaggtcccttctaatacctgtaaaataccgtaatctacattttttacaatttgttgaaggtcttcttcataaaaaggtctgattggatcttcaatctgaactttttgataaccggacatcaatttatccaatacacctttctcttcctgaagtgcttcgaatagggcctcatttgcctgctgagcaaaatcagaggtcagctgatttaaattcccttcttcatcagggtttttacgttttagcatgataaacttttttttagcgttaataacttgtgcaatcaaagtaacccaatttatggtgattgcaaacccgtattaatacccgttttatactgtaaaaacaaaaaaaaacctccaaaatcaaatgactttggaggtttctattttttataggaatcagatcctgataactttagttcatgatatcattgaactcgtgtaatgatttcaatgtactttcgtagaataaaattgcagcaattaaatttcctttatctgagtaaggcatcatttttctttgaaactctacagtagtatccaaaaatactgttgttccttctgcctgaccgtctaacacttttttgtgctcactatcgtccggaatacctaagtctgccatagtaacacctggtttagtaaccaaagcgatataaggaagtgtttttactaaaactttaatacgctcgatgtataattctaaaagttctcctttttgcataccactcaattctttttgatcatggtatttacgaataatagcagttgtactgattatacttcttggagcatttttcgcctgtgctgaaatagctccagttgcaaaaaagaaaaagaaacttactagaattattttacttttcattttactaatgtaattggttgtttgaggaacacaaaagtatacaaattaacttaagccgcaactttaatgattccttttttttaaaaaaaattaacattttattttatgtcaatctataagacaattctgaggtactggagcgcacatttcaggaatttaatgcttgtttgtttttttatggaaatccccacatttccccgtaaatctttacttgtgcttacgatttaatgactctgaaacgtcccggatacttgatccagatgctttttttattgccataatagtccataaaatcttcacagacaaaaacggcgtgagcagtagaccacgccactactccgcagtattcacttccggattgtcgttttaactttagcacttgtttaccttctttgaatcctaaatatttgtaaatggtaggagtatatactgaaccatcttctaaatcttctaatgctttgtcaaaagtatcgaccttatcaataatttgtttgtatttcgccattacagcataagtcagtattgcataatcggtgattttttcactctcaggattgtctttaatataaataaacccggccgatattttagctttactgatttcgtcctcttgcagattgaatgatgcattgttttttaaggtgattttgtgagtgttttcaccggtcttttcgtttacaaaaagattgtctaatccatagacatttaaagaggctttaataaaggcaatcgacgaacaattggtccgttctccctgtttaaaactttcgaatattttatctgagcttaactgtgaataagaatttgagtagacaaatattaaaaataaaaatagtgaagtaaccgctttcattgtcttagtattttataattaatcccaatccgtttttgggcatattattgatagtacaaatctataaaaatcaacgtaaaattgttttctacttcttcctttttatcaaaaaatgttgcgaatactctaagtaaatccttttgaaagggttacgattgcattaacttaaaactttctgttttctaaaaaatgtaacagagctgattttttgcttttgacgactttaactctaaatttagaactttagcacctattgtactcttataaaaaccgactcaacaccttctatcaacgctcgatatccttttcttttttcaattgcaactagttctcttcgttttttatcaaaaataatcctggccaccttttcaaaaacaagtataaatacctgtttttaaacctgttaaaacaaaaatagcatttttaaactaactttatactatctaaatccaactaatccgttgaatagaactcaacactaaccaattatacttatggcaacaacagtaccccctgacaaaaaaagcaattacgaaaagttgtttgcatcctgcattataaaagaagtcaaatattctgaaattgatgcattggtggctaaaatagtttcaaacaaaagcagatatcaatctgttggtgatcccttaaatattccctggtacatgatttctattatacattgtatggaaggaagtctgaactttactactcatttgcacaatggcgacccacttactaagcgtacggttaacgtaccagcaggtcgtccgaaagcaggaaatcctccatttacctgggaagtgagcgcaaatgacgccttgatttacgacaagctaaattcatggacagactggagcattgccggaattctataccgacttgaattgtttaatggattaggatattacaagcagggaataaattcgccttatttatggagttattcgaatcagtacactaaaggtaaatatgttcaggacggcaaatacgatcccaatgcggtctccaaacaatgtggtgccgctgttctgttgcgccgtatgatggaacagcatctaattacactgcccaacacgcatattgtagaacaaatcatagcgcagggaaaccaaacgatgtactattccgggaaggttacaaacgaagctgtcgagcttcaaaaacttcttaatagtgccggaagtgttcttagaattgacgggaaagcaggagaaagaacttcaaccgaatattttaaatatagcaaaacttatttaaaaggagatcccagaagagtgtaacacacaaggtaagttcaatattcctgatttatgttttgcttttttaaaatccagtcctgattccgaatgttttttgaaaacattgctgtttcataaagctttaaaattttaaacgaagttctatccgaaaaacgattttcataacccaaaacttgttaattttatcttcaaaaaaacagatgaaaaactacgtaacactactgcttgctgcaattgctctattttttacttcctgcaacgctacaaaggatactacaaaaaataccgctctttttgatactacctgggagctcgaatatatttcgggtccgagaattgcttttgagggtttatatcccaacaaaaaaccttttatcaagtttgaccagaataccggtcaggttttcggaaatgcgggttgcaatgggtacagtgctccttatactttaaagggaaaaacgatcagctttggcgaacaggggcctaccacgatgatgttttgcgaaggcggcggggaacagacttttactgagatgatccgaaaaatcacctcttattctattgataaagaaggcaaactaaacttattgcttaacgatgttccgatgatgcgtttcaaaagaaagtagtccggtaacttcttgattcatcccaatcttagttaaaaacagctgtatcttttatcagatttaaaaaaaaggattttgttaaaatccttttttttataacctaaaattaccgcataaaaaaaacatctgacataactatttatatgccagatgtagtcacaaatcaaccttcaattaaaattttactttcccggatagacaatattatcgttctcttgtacggtataggaaaagctatctgcttcacaaagcctgaaataaccaaaagcaaaattattggcatttgtagtgtttacaatgttccctctgatatttccgggaggaatagaaaaaggacttcctccgtatatctctaaaattaaactcatatagttgtaaaaattcttagaaatacctcgatttatcaccgaaagactttttcccggtttcaaatcgggatctgaaaatcttggatatatttcatttccattaaacaattcatcatctaacagcgtgtgtgaaggaagacgaaaaacatcactcttataatcggtaagataaaaattgacctgatccgccgggtctttaaaataaaacgatatctcatacaagtcgtctccggctacatccggaacgcgtttctgttctattttatcaataggtgctactgaaattaacttttcggctgccgtaaaagtttgcccttctgcctctacagaaagcacataatccatgttgatcacaggtacaaaattagtacatacgtaaagtcctggtcctgtttcattaaaagtaaagacatctcctttgctattggttacttttactttagctcctgagacttttggagttttatcgttgtaataaggagccgttttactcaccttgatgacctgctcactaccggaggttccttttttccagataatttcggcgtcgactacgattctcgtttctccggtttctaaatcaagttttaccacatcatcacaagaggagaaaaacagtaccaaaacaaaacccaaaatagctattgtattcttctttatcgtttttatatcaatcctttgcatattcattaaaatttaaaattataagaaactcccggtactaccccaaaaatagaaagccttttcgtctcattcatccctgtgtcttcatttgttgcaaaagtcatcgcagctgcattttttcggttgtaaacattataaagactaaatacccagtagctctgccatcctttctttttatccggttttggcgtataagttgctgccagatccagatggtggaaaagtggtaatctgttttcatttcttaaggagaagtttggaacattaatccccccaaactcataatacccattggcataggttactggctgacctgactgcaaactgaaatttgcattaaaagaccattttttattgtattcataattccccacaacacttaaattgtgcagtttatcatatcctgataaataccatttaccatttgcgactcccggttcttccggtgttcttccgggtgttttttgttcagctctggataaggtataagaaacccaaccggttaatgctcccgtattttttcgcaacattaattccataccataagacctggctttaccattcaaaatcacctgttctatattgttattggccaaaatatcggctccgtcaatataatcaatacggtttttgatttttttatagaacagctctccttcgaaagagtattcattatctttaaagttctgaaaataacctacggcatactgatccaaaagctgcggttttgtaaaaggaccgcttggtgtccaaatcgttgttggcaagggaaactgcgtattcgacaacatgtgaatgtactgcgccattcggttgtaactcgcttttaccgaagtagtctcattaaaagcatacgatactgcagcacgcggttcgaaattatcaaacttactgatggtcgctccttttttataagtgatacttcccgttggagttccttcttcataaattttatacaacggattgtaaactactgctttcccatcttcataggtattgatttcttcccctcctaaacggtaaaacatactgtaacgaagtccgtatcgaaggttcagtttctctgtaagctgatgctcaaagtccaaataaacagaagactcaaaagcatactttttatccaactgtttgtaattaaactgcgaagttgtattggtaggctttacggttccgggattaaaatcgtaatactgaccttctattccgtaattcaattttaatttttctgataccgtctgactccagccatatttaagcccataagtcgaaatcttattgttccattcaaaaccttctctatccaggtccagattaaatttataatcactgaaatatacagacaagttggtatttaagttctcggaaaacttatgcttccagcttaaaatacccattgtatttccataagtactgttaaaaagattattcaaatcaaaaaggtcgttcccaaaataccctgaaaaagacagtgtattattggctcctaagcgataattgaacttcgcatttaaatcataaaacatcacggaattcttactgtcagccagtttcatgaataaatgggcatacgaagcacgtcctgcaatgataaaagatcctttttctttttgaataggtccctgcaccaataagcggcttgagatcaaaccgatacctccgttaactttgtacttttcaaaatccccggtttgctgtgtgatatccagaacagaagaaactcgtcctccatatttagaaggaattcctcctttatacaaatctaatccattcacaatatcaggattaaaaatggagaaaaaaccaaacatgtgagaatcagcataaaccggaccaccatctaccagaatcaggttttgatcggctgcaccaccgcggacattaaaacccgacgaaagttctccggcgttggtaactccgggtaaggtcaatatcgattttaaaggatcagcttctcccatggccacaggaattcgtttgatctcggccatcgaaagtttgtttacactcatttgagtatttttaacatccacagccttattggtggttactacgacctgctccaactcatgactgtcggaatccatataaaaattgattcttgaatcgtcagcaactacaatttgtttttcgttgtttttcaagcccagataactgatcaatacggtgtaatttcctttgtccagtgttatcgagaatttcccgtctgcatcagttgttgcaccggtagaaagttctttaatgaaaatattagctccaataaccggctgcttgttctcgtcaaaaacctgaccactcagcttatttttttttttaggtgctttggttactttttgctttacaaaaatattattgccaacgatagaaaactgaactgctgcacttttattaagttcattgaccagttcttttacgctgatatttttataagtctttgtttcggtaaaatacttttgactggtattgatttggtctgtatgcgcaaatttgaaatcactctggctttcaatttgtttaaagaattcttttagtgttactgatttatcaacagttatggttacgttttgagaaaacactccccagctgaataaaaaaaagcacgctgaaattatatgcttcatgaaattttgtatttttgatattattaaatgagatagtttcctgctatcctgatcatgaggaggatgtttagtttcgcggctagtgcatcctttttcttttctattgaaaagtaattacttttaattcttcatttatttcaaaatttaggttatacatttcggatattaactggataattatttctaaatcttcttttttattgattctcaaagtaatgtgctgatcgtaatattcctttggaaatttcatcgtgtaaccatagtttgctttaatgtaggcagcaagaacggtcaacttttcattttcaaaatcggtaaatctttcaaattcagatacctcaaccgtattattggtataggtaaatttttcaccgggtacgagtatccatttttgagtctggtcttttacgctcatctcaacgcttccttcaaaaagggctaccgaaacttctttctgggtgtatccttttactaagaaagaagttcctaaaacagtggttgtcgtttcattgcaaaaaacctgaaagggatgttttttgtcttttgttacctgaaagtaagcttctcctttaatttctattttacgattagtctcgaaattatcggcatactcgattctggaatcaggacttaactccactttagaactatccggtaaaaaaatcgtttttacaattgaagtcttattttcaattacgtttgaagtcaatttaatttcttgctggtgctgctctttattaaagaaaagtcccactccgataaacgcaaaaagtaaaacggctgccgctgcggcataatgccatgctttaaatcttgttttttttgaaggaaaggctttggattgaaatgcttcccacgaggtctctttttcttcatcagaatgcgaaatgggaacatcatcccaaatcttctttagttcatcttctacttttttatcattcatatctttggggcgttaaagtttctgacaataaaatccttgcttattaaaaacaccatacaccatatccttaatctccctgttggtttcgattgtcagaacatgatttttgtcttctacatcaaaattcatgatacaatcagaaataacaaattgaagcagcgctacaacaaattttgcttcttcctttgtagtaacatccgttttgtaagtttcaatattcattttatgttctcatttttatagataacaaacgagaacaaaaaagttcctaatggttttcgactttttttcgaataaatttactggcgagataaatatgattggctatggtcttttcagaaagatccgttaaagctgcaatctccttatagctaaggttttccagtttatgtaaagtatagattttttgctgttgttcaggaagctcatttattaaattatttaatatttcctgtctttcctcaaaaatttcatgatcgttatcctctttttccatcacaacatgcgaaggctcgagctgtactattttattttctctgttgagatgattgaggataatgtttttgcagatcacaaataattgtttgtcgaataaaacatcttcatggagtaattctcttttattgtatactcgtaaaaaagtctcctgaacaaaatcctgtggggtaagtactgtaaaattaaagcgtttggcaatgtttatcagtttatcgtagtaattaaggtatgcttccctgaaagcggcctcattacctttttttaaacttaaaataaacttcctgttatccataacgcaaatatgataattagtctaaactcaatgtctaaaataatattgtggtgtcaagcgaatcacttaagacttatttaatctttttcttaagcaattttaagatacaaagaacagaaattttcttgtaaaagtttttaacagaaaaagaaattaatcctaaagaaatgctaatttactactttttattttaatcttatttttcttaccatactaattaagcagaaaccaaccttgcaaaatcaagactttataatcctgacaagaatatggttctttctccaaatttcacttttaacaaacttgacgtttacacttgttaaaaataaaaatgcagcgacaaaatgttttgtcgctgcatttagtgtatctccactatcaaaccaaagtggtaccagttatttgattaaaagtgcttcgagtattttaaagtagatttctgtgttttgataaactcccataaaatttgcagctccgggtccataggcaaaaaccggaactggcactgctgtgtgatcgtttgtactaaaacttccctgtacatatcctttttcgatgctgccatcaattaaggagagtcctccggtttcgtgatctgccgttacgattaaaagtgtctcctgattctgatcgacaaattccatggcttgtcctaccagtttatcaaaatcaagcatttcacgaaccacgtattccaggtcatttttatgtccgccataatcaatttgcgcaccttcagccattacaaaaaaaggattttttgattttgaaaaaacggtcgttgtctttgccaaagatttcgctaaaaaatctccccttccctctttcatcgaaaccaccgaagcatcatcgaccactacaaaacgtgaatttttaatggtgtccagacttttaaactgatctgaaaaagtatagcctttctctcttactattttagacagatctctaccgtcttttctgttattaaattcttttgtgcctcctccaatcaaaatatcagacggattggcaagaaaatctgcagcaattggttcgcttaaagttctttcagattgatgcgcgtaaaaagctgccggagtggcatctgtaatatttccagccgaaataatagccgttttgtattttttctttgccaattgctgggtgattagttccaacgcttttccgttttcatcgacactgataaatcggctattggttttatgacctgttgccattgccgtagctcctgcagccgaatcggtgatataactgtctgacgatttcgtgatcgacaatccctgagtcggaatattaaaaaggttcaattgtcctttattggctgtatacccggcataaatctgagtaagccccattccgtcgccaataagcagaattacatttttgggacggctgtttttagaaaataaagctgcattcttaggtttataggcctgataaaatgatgtattttggtaaaaagtactttttatcttctgaatgaactgcgtcaatgccggcacattatcagtaccaatataatcgacttttaaattcatcaaagtcatccaggtgttcacattatcgggtgtcgaccagaatctgatttttttattctgtgcatgaacttttttaatgaccgactgtactttttctaaatcagcctgtgtcattactccttttccgttccaaacggtaagctcttttaaatcttcgctaatcatttcgacacgtgacaattgttccgatgaatacgtttcattccttcttccgtcaaaatagataaactcaggatattgattccagtttgatggttcaggtctgtttcctgaaataactacttttagatttttgtttgaaatcaaatcgggatacgttttcaactgttgcacaatccctttaagtgtggcatcagcttctgattttatatcaatcattaaaattaaaggcttattatcagggtaaactttaccttctaagttttttatcttcttcgacaaaggatccaaataaagacttcgcagtgtattgtacgttttgatttcttccgaagtatgtgctaccaaaagttcattattcctcagaaaaacatccgcttcgataacgcctgcttcattggaataggcttcataaaaaggcaatttacctgcataatcattgtgtgaatgaatattagccgaactgtattcctgtgcctgcgccaacagaaaaaaatgaaggcaaaaaagtataattatttttttcattacaaataaaattaattcaattctaatatggtcttcaatacttagaagatgagccacagattaaaaagatttccacagatttctttaacccattgactgtaattaataaaaaatcatttaacacatagaaacctgtttcttacgcatagcttcctctgtgtttttaaaataagtgaaacgccttacttaagagtataaaatctatgtgtttaaaataattacacccaacggctttctttgctaattaagtataaaaatggatctgtaaaatcggtggcaaaaaatatatgcttactaggtgttaagcccggtcaaaataggtaggcaatttgcttttttctttacaactgcaagctccacaactaagcctgcagcgtaaaaaaactaaacaaacaaaatgaaactactaactaccaacctttattctggaaaagagctcctttgctcacggcaatctcatccggtggtattggccatacatggtgaatggcaggattaaaattacgggcaggataaatcactgttccgttgtaatgatgtaaaggttttgcataagtcgcctgagcatcgccccagcgtactaaatcgaaatgacggtctgtccattctcctgccagctcacaacgtctttctcttttcagatccgttaatgtggctcctccaatacttggtaaaccggcacgatttcgaatcaggtttatttcggtatcggcacttagtcctttcattaattttgcctcagccagcatcaggattacatccgcataacgcaaaagaggtagatttaaagcggtagaaggcttgtctccgtttgcatttacataacgaatatcaattccacccgatgtcgtttttggataaccgaatggctccatgtactttttaaactgataaccggttctgttacttgaactgaccatatattttccttcattaaaagtgactaattcaccgaagtacataaacttgtctcctttttgaagaattgtagcacttcgtcttttatcagcaggatcatacgtatcgaacaattctttagtaggataaaaatttccccagccattgtaaactccccagcctttatcttccaggcatactcccggaaaaatagatcctaagcttgtattttcggcactcgaggttacggaccaaatgtactctgacgaccagttgtttttaattttaaaaacatcttcgaaattatccagtaatttgtgttttccactgttgacaatcatattggcatacttaatcgcattgtcccagtcttttgcatacaaataggtacgcaccaaatatccccatgctgccgttttatgcgcacgtccgtaattgtctgaactaagttcattgaaataaggcaataaatcggcagctttaatcagatcggcagcgatataggcgtagttttcagctacgtttttagcacgcggcacatatacattggttgggttttctctgtcctgaattggaatcccggcacgatcatctccatagtgataggccaattccaaatgcattacagcatgattgaagtacgcttctcccaacatcatgttttttgttttatcgtctaaagagattttcggaatattgcgaatcacatcgttacagcgtttcatcacttcatagtgaagtctccaaatgtctttggtgtccgattctgctccgtcaacaataaaatttttgattcgttccgcattttgtcttggtttcgttccgatatcatcactggcattgttcagccagaaaaatccacgaccgtacatattatcatccgaatagagtgcataaatcgcattcactcccgcttttgcatcagcaggtgttttccagaaattaccacttgaaggtgctccctgaggtactaaatcaagttcattttcgcaagccgacatgctcattaaaagcaccagactccataataaaagacttaaatttttcattttatttgtgttatatttttttaaaaagttgcgttgacacctgtcatataaatacgggatagcggatattttcctaagtctaaaccgaaattcctaagtcccacttccggatccattcctgaataattagttatggtaaaaaggttttgcccggagataaaaaatctaagtttcgcttttccgtgtaaccattgttcttttactgtatatccaatcgaaacgtttcgtaatctcaggaaagaagcatcttcaatataaaaatcagagattcttccgaaattattattgttgtctgttgacgaaagcaccggaatattggtattggtattcgttggcgaccatgcatttttagaatcggctaataagttatagcccgggaaagaagcattcacacctgtatattttacggcattaaaaactttgtttccggctgttccgctaaggaagatgttcatatcaaatcctttgtatctgaaattggtgtttaaactgaaggtcgttttcggaaaaggacttcccagcactactctgtcactgttattgattacaccatcgccatttacatctttaaatttaatgtctcctgcaaccgcattaggctgatacactacgcctttattatttacataagcttttgcttcggcattactttgaaacaatccgtctgtagagtacccgtaaaatgctccgacaggacttccgacctgatagatattagccaaaggcaaactacgaacacggctaagatttaaaggctctaaggaagttaaatcgtctttgatcgaaacaattttattgcttaagaaggctgcatttgctgttacatcaaatttgaattcgccacgtgttttttggtaggttaaactggcttcaattcctttattttcaacattacccgaatttacgattcttcctaacggagttcctgaaactcccggaagctgatcgcgaaccaacatgtccttattcgttttaatgtaagcatctacagatcctgataaagcattgttaaacatcgtaaaatccaatcctacgttgctctgctctgaactttcccatcttaaattaggattcgacaattcgctctcagaataaccgtaagagattaccggactgcttccaattaaagcttgtgtctgcgttaaaggcacactaaactggtaaggtccaagatttcctaagtttccaatctgtccccagcttgcacgtaattttaagttgcttactaacgggtctatgcttttcatgaatccttcttcagaaatcaaccatccggcagaaacagaaggatatactttccagcggttgtctgaagttagttttgaagtaccgtcacgacgtataattcctgaaatcaaatacttttgattaaagtcgtaattcagccttcctacataagaagaaatgatttcttcaaacattcctgcttctacctgctgcactaacttagcatttaataaataacgctgtgatggatcttcattatcaaagcctgttccctgcacggtataaaaatctcttttggtttgctgataggtatatccggcaagtgctttaaaattgtgcttacctaatgatttttcataagaaagtgtctgctcgcttaataagtcagttgtggtagcagaagattttgttaatcggttaaaatcaaatattttacccggttctgttatttttaccgcaaaatcggttgcgttgttctgaattctggtatatccccagtttgatttaaattttaaacctgatacgatttcccattctgcataaggattaatcaaaacagtcgaaatcggattgcggttgtccagtctttttaaataggccaccggattgattacgtctccataagaacctatatatttttcaggaacacctccaaactttcctgaaccgtcttctctatagatcgtcgcgtttggcggataaaagatcgctgctaaaatggctcctgtgtaaccacttgttgtattggctgcctgaccgtctgttaaagagtacgacagattttcacccactgtaaaattaggtgccagtttaaaagaggaattggctctcgctgtataacgggtcccgtaggtattcagcaatattccttcgtttttgcggtaacttccggaaataaagaaattagatttctcggttttaccatttactgaaatagacaaatcctgaatttcgccagtacggaaaatttcatccatccaattggtctttgtggttctggctgttggttcaaaagccggatcaaaagccggaattctcggcatacctgcattatctctggcggtgttcatcgcatccgcatattcagccgcatttaaaacgtctaactttttagctacgttttgaaaacctccctgataatttacattgatgtttatacgttccgaaactccttttttagaggtaattaaaatcactcctcctgaagctcttgctccataaattgctgcagaagccgcatcttttaaaacacttatcgaagcaatatcgtttggatttaaagtgtttaaagaaccgctgtaaataattccgtctaaaacaatcagtggtgtttcggcattcaaggatccgatacctctgatattaattgtaggctcggcagttggatcaccaccgttattaattacagtaacacctgccactgttccttgcagtaattctgcggcactattgtaggttctgcttgaggtttctttcatcgaaacggttcctactgatcctaaaacttcattcttttttacacttccgtatcccattacaaccacttcctgtagttgtttcatatcggccgctaatttgacacttatgtttttatcggattgtgtcacttttatttcttgtgtcacataacctacataggaaaagacaagtactgcggcagacgaattgatttcgattttaaaagttccgtcaaaatctgtagtagctgttgcatctgaatctttgtctttgattccaacacccggtaacggcattccgtcatcaccgccaaaaacagttcccgaaatgcttattttgccctgaccgacgtctgaaacttttatgctttttttaatcacaatattgttgctgaccatttcatatctcagcagcagattgctgcatattttatccaaagcctgctccagaggcacattattaagcttcaaactaatcttttgattggtattgacctgattggtttcatacataaaatgcacgtcaacttgtttttcaatcttctgaaaaacactctttatactttcgttttctacttttaaagttactcttttaccgatatcaaaacgggccgcttttacggttaatccgataaaaaatagcgccacgaaaagcagtgccttcgttagtaccgatttattaatgctctgagcctttacgacattccgcatttgctttttattcatgattgtgtgttttttaattgtttttgattgtggaacggttttctacgtagattttttaatttgatttttaagggaattgtattccggctgatcgaagcaggaattggagattttaaaaattcactcaactccgctaacccgcattgcgctatgcgaactatttttctctcaaccgtattttttaaacttaacggatgacataagtccccgactctattttgtaatctgcattgataatattgcacaccaaagcaacgacctgtcctgccggaagttctttgaaataagcactaatttttaagttgtttaaatttttgtttgcaatctgaacggttacgttataatttcgattgatcgttgcaatgacttccggtaaaggggcatcttcaaaaacgataatatgctttcgccataacgaaattgaattcattgggatatccttaaacgcctgaagtttgttactgtgcgatttaaaaaccactttttgccccggagttacatatacattttcttcggtcacagttgatttgacattcactcttcctgtcagtaccgaaacttcctgagtagtctgatccggataagcctgcacgttaaaactcgttcccagtactttggtgtccattttatcggtatgaatgataaagggatgctttttatctttggctacatcaaaaaaagcttctccgattaaatagatttctctggtatcccctttaaaagtaaccggatattttacgtgacttccggcattaagccatatctgagttccatcacttagaactattttagcgtgttctcctgctcttgttgcatattgtctggtaatggtttttaatgaggataaataaaggaaacaggacaagctaactacaaataacaaagaagctgccaccgcccaattactattaggaaaagaaataaccttatccgtttttttaatattttgaatttccttttttaacttcgattggtctgatgtgatcaatgctatcgtgtcgaatatttcttcaggatgatcgtaccagttattccataattcttccccatttaaagagggcttcccttctaaaaaaagttttatatcttgatgtgatttttcaggcattataatgtgtttatctctttaatagtatgtcttagaaatagtaatttcaggtaggcgcttaaggttacgcttttgttaagaaaaaatgcataaccttatattagccatctgctattagttaaattcacccaggtagtttcgcataaactttaatgcgtaggcaatgtgatactttaccgtttcgtgcgaaacattaagttcttcggctatttctttgttggtgtaatgtttgattctgctgagaataaaaacttctttggattttttaggaagcaataacgcagccttatcaacggcttcctgcagttcttcataataaatagaatcttcggtagtgttgctgccgtcgcaatcattggtgtttctgtctataacctctcttatatattgatcggtgagggtatgcaattttatataatctaaagtggtataccgaacagaggtgtagatataagctgaaaatttcttttgaataaccaaactctttcgcctttcccaaattgttgtaaaaacttcctgaacaatctcttcggaaaccggaaccgacttcatcctcacataaacaaaccgaaccaatacatcccgatatcggaaatacaattcatcaaacgctttatcttttccttgtctcaataactcaacaagctcctcatctgtaaacttcttatacatgagacactgtttttgaatgatttggcgaatggagtgttcgaaataggactttcgatccaatctttatacagcgatgtattctgattttaaaaaatgacatatactacaattgtgttgtttataatatgtcttcaaaattaaagctgagggtaggtctggaaggttacgtttacattaataaactgagctcgttataaaacattatattaacatctgatgctttatgttacgtcaatattgataggagatcttgttcgatatcagctttgtaaagtgtcacttgttaaagcaaagcatactgcaagtaattacgaatttgccgcaacgatcttagtatttggtgcagaattttttctccataattttcataataatgtgtcaatagaaagcttaggttgtactatacctcctacaactatcatatttctaccgtaaaatcgtgcaaaacaccaataaacataaggatgtggctcatttttctgctacttgcgatttatctcactcattattagtgtttccgacattaaaaagatatttcatgacaataaaaacctttctcatgacatatttttcagtttcggtgcctaagattcttagttttaacctgttttagaagagaaaaacaggtagaaacacctgtttttgagagttttatattttatatcttagttgaaatataaaaattgtccttttatttcttagttaaaaacacaagtaatatcaaaaacaaatataaacactaacctattaacactaaacactatggaagaattcattggagttgtaaaactttttgcgggaaattttgccccaagaggctgggccttttgtaacggacaaatattgtcaattgcacaaaatacggcattattctcaatccttggtacaacctatggaggaaatggtcagactactttcgctttaccaaatctacaaggtgcaacagctattggacaaggaacttcacctggaggaacttacgttcttggacaagctgcaggtacaccaaacgtttcaattttaacaagcaaccttcctgctcacgttcacgcaggacctggaaaaatttctgtgagtgcaacaaatgcatcagattcaacaccggtagccggagcatcgatagcgatacctggagctgttgtatcaagagtttttacaccaacattaggctttgcaacagcaactccaagtgtcgatttattaagcaatgtaaccactggtgccactggtagcaatctgcctatctcaataatgcagccttatgtagcattatcttatatcatttgtttagaaggaattttcccttccagaaattaaactatttaagagcattttttacattataagaccatttgggtatatcgctgaagtcgtataaaaactgaatttcagaatactctgtaagattgtacatagaaacaagacaaaaagggtttgtaatataagactccgcagtttttaagtcgatgtcttcaaatatcctgatttcagtaaaaatacacacatcgggatggttgctaaaatcatcaggcagcttataaaagtcacttttaaattctaaatcctgacttctattgccaaaaagttctttgcttattgtaaataatctatctacaaatacactatgaggatagggctgtatttcgttacggcccttaacctctgatttagcattttttaatgatggctcatgatcggaataagtataactcaaatcaatcttgatttcttcgggaattaaaattccatgcgaagacagctgcgaaacaatgtttcgcgtaatcgccacctgcggctctcgggtaagagcataatgcatcgtttcggagatggccagatcaattgcaaactcttcaggttttgtatacgtaatggcatctgtttcgattaattctaatgaataatcgtttaaaccggtcaccgataaaatatgatgtacagatgctattgaagcagtattgatatccagtaaaatggctttaattctatctttatgaaacaaaggaagtaaaggaagaattaaagttgcataagggccacaacccgcataaagaacattaatacttctctcagggaaatcattacacaattttgtcagagccttataaacgccttttatgaaataaaccgtgcgtaaataatcgtcaacacagtctgccgcaccagagcttgacaaagcaacaccgcctttaacatgaacttcattgttctcaaaatggttaactgttgcgattttttcataaaattctgaaaggtttcgcgcacatgtggtgtgttcatcaatagtatttgacgcaatgatagattgaacaataatcgtaagctcttgtttatacatgatactcaattttagttaaagctttaaagttgaaactgaaaaacaaatgtaagaatacaaaatgataaatctaatatcagttaattatgaaaaaactctacctattactcattctactgttttttacgctgcagcaattgactgcacaaacagtagagaccttcgaagctcagacaattaaccagtctaactttaccagcaatggtaagacctttaatctgaccaatacctatatttcttttcaggtagttgcgtcgagcggttttggttataacggttccaataattacatacaagtttcagatggtctagcatcacaaagtttaggacaaaccggattcattaccgctgcctcaggaagctttaagatgaatagtttatttatttacctcgcaggtgattctactcagaatcctaatgttacctcaaatggtgctccgggttcggttaccttaaccggaaaacttggaggtgtaacacaattctctattgtaaaaaacactactggcgcaaacattggtattgccttacctaatagaggttttattcctattaacttcgcaacagacggagtttcaaattttaccaatatcaacattgaccagcttgaaattcagctaagcgccaattacgattattttgcaattgataattttacctgggttgatggggtaagtttaccaacagtaactactacaaccgctacaaatgtgggttcaacgaaagcaattattggaggtaatgtaactggaaatggcggagatgtcaacgtagaaagaggaatagtttgggcgacaaccgcaaacccaactatcgcaaacaataaatttcaaatcggaactggaactggaatttttagtaataccgtaacaggccttactcccggttcgactattcattacagagcttatgctactaatacagcaggtacagcttatggtgccgagtcaactttcgtaacatcggctgctttagccacttcttccacctcaaaaacagatgtggcttgtaacggaggaactactggtgctgccagtgttaccgtaattggcggagttactccctatacctactcatggtctcctgcaggaggtaccggatcatcggcaaccggactgtctgcaaatgcatacaccgttacaattaccgatgctgaattgacacaaattaccagaaacttctcgataacacaaccaacagcactaaatggactgcctacgacaacggctgtttcctgttttggaggcagtaacggtacagcaacaataactccaactggaggtacacctggatatacctacttatggtctaccggagctacaacgcaaactataacaggccgtgtagccggaacttatagtgtgatcatcacagatgctaacaattgtcctaaaacaataaacaatattgttataggtcagcctgctgccgcacttgacggaactgttactaccacagccgcttcttgttttggacttgctaatggtacagcaacagttacaccttcaggaggcacaccgagctatacctattcatgggctccatcaggaggtacagcagcaaccgcaacaggacttgccgccggaacttatagtgttactattacagatgctaacgcatgtcctaaaacgataacgggtattgtggtaggacaaccagctgccgctcttgatggcactgtgactacaacagccgcatcttgttttggaagtactaacggtacagcaacagtaactgcaaccggaggtactccggcatatacttactcctggtcaccaaccggaggtacagccgcaacggctacgggacttgctgccggaacttatagtgttaccattacagatgctaacgcatgtcctaaaacgataacgggtattgttattggccagcctacagctcttgacggaacggctactacaacagcagtttcctgttttggagcgaataacggtacggcaacggttaccgcttcaggaggtacaccaggatatacttattcatggactccatcgggaggtacggctgcaacagcaacaggacttaccgccggaacttatagcgttactattacagacgctaacgcatgtcctaaaacgataacgggtattgtggtaggacagccagcagctgctctcaatggaactatctctacaacagccgtttcttgtttcggaggagctaacggtactgcaacagtaactcctagcggaggaactgcaggatatacttatgcatggtctaacggagctacaacgcaaaccataaacggacttatcgcagggacttataatgttaccattacagatgctaactaatgtcctaaaacgataaacaatattattataggtcagccagccgcagctctcgatggaactgtaacaacaacagccgcttcttgttttggaggatctaatggtactgcaacagtaactgcaaccggaggtactccagcttacacttattcgtggtctccatcaggaggtacagcagcaaccgctacaggacttaccgccggaacttatagtgttactattacagatgctaacgcatgtcctaaaacgataacgggtattgttattagtcaaccagctgacgccgtgaacgggactgtagttacaacagctgctacttgtttcggtaatgccaatggttcggctacagttactccatccgggggtgccggaaattatacttattcctggtctccaacaggtggtacagcggctacagcaagcgggcttgctgcaggaacttatagcgtgaccattacagatgctaacgcatgtcctaaaacgataactggtattgttattagtcaaccagctgttcttaacggaactgcaactacaacagtagtttcgtgttttgggcaagctgacggtactgcaacggttactccaaccggaggtacttcgggctatacttacttatggtctaatggagcaacaacacaaaatataactgatcttgttgccggaaactataatgtggtcataacagatgccaacttatgtaccaaaacagttaataacattattgtatatcaaccaactgctattacagttaccccagcacaaactgatgtaacctgtaatggagggcaaaacggacaagcttcggctaccgtaagtggcggaagcggtagttatacctattcatggtctccatcgggaggtacggctgcaactgcaaccggacttactgcaggaacttacactttaacgatcactgatggtagtggttgtactaaaactcaagtttacaacatcttagaaccagctgcaatcgcaactacaattacaggaacaaatgttagctgtaacggaggaagcaatggttcggctactgttaatgtaacaggtggaacaggtggttatacttacgtttggtctccaaccggaggaaattcagcaactgcaagtggtttgccttcagggaattactccgtactggttactgatggaaatggatgtgccaaaactgccaatattgtgatcaaccaaccggctctattaactgccaccattgcaactcaaacaaacatttcctgcaatggagcaagcaatggagcgattaccactactataactggcggtacaactccatacacttacttatggtcaaatgcagcaacaactaaagacatcagcggattaacgacaggaacctataccctaacagttacagatgctaatggttgtactgcaccactatcagtaactttaaccactactcctgatgtaacaccaccagtaccaaatgtggctactcttccagtaattacaagtgcttgtgctgttttatcggctcagattccagttccaactgcaacggataattgtagtggaaatattactgcaaccacaacgaatcctttaacttataatacaccgggaacctatacaattacctggacgtatactgatgccagtggaaacacaagtacacaaaatcagaccgttaaagttcttccttcgtctattcaagcagtaacttttagcaatgctacagtaacctacaacaaaaacccacaagcaatacaagttgctaatttacctgcaggagctactgttgcttatacaatagcacctggatctacaggaaattcagctacaaatgcgggtacatatacggtaactgcgctagtaactcctgctgcaagcgagcctaattgttctccaattacgcttactgcacagcttactattcaaaaagcagcgcaacaaattactttcgcagctttaggagtaaaaactcttggaactataaatacgttctcactgggggctactgccagttcaggtttagcagtgaactattctttcacctacaaaacagctttacctgctgctactgttgctccattaactggtctcgtaactatgttaagacctggagaagtaacaattattgctgctcaggctggtgatgcgaattatttacctgctgcggatgtttcacagcttttggtgatcaaaaacaatgacatcactgttactcaaattactgttggtactaaagtttatccaaatccggctaaaactattaattacctgatggcatgtggcgagaacaacgtaaatgtagcattgaccaatacaaccaatgcaacctttactcctgcagctaattttacgatcaatacacctaaacctggaatttatacgcaaaacgtaacaattacttctgaagacggaagtgctaatgctacttatgctataactgtagaaaaaccatttggattctatgatattgtacaccaaaaattcaataatgtacttatcgtaaacaacaaccctcaaacgaatggaggttatgagtttgtttcgtaccaatggtttaaaaatggacaagtaattggaacaaatcaatacttttcagcaggtgaggctcaatctaatacattggatttaacagccgattatagtgtaaaaatgactactaaagatggtaaagtgctgcaaacatgtccttctaaaattaagacacagaaatcacttgaggttaaattgtatccaaatccggttgaaacaggaaaaatgcttactgtagacgctgatctaccggaaggtgatttagaaaacatgcaaataagtctttactctgttacaggtaaactacttacaacaatgaagtcgtctactgctcaaacacaggtgcaattacctcctagtactgagagtaatatggttcttgtagttattgaatcaggcaatatcaaaaagtcattcaaagtacttgtaaaataatcaaaatcatgccagtaccacttcaaaatggtactggctaatatttcgacggaattgtttaaacgtttgctatagctcgtaataaaaagttttgtttacaattttacactgacttgaaaaataaaaaaggccttcaggaatttgaaagcctttaaaaagtaaagtaagaatgaattattttttagattcttcaatagaaacttttctaaactcttttaaaagtttttcaatttccaaagatgatttacgtgctctggccccggcagctttaactcctttttcagctacagcttcagattctgttttaaacgtttcgatttcggcgttgatttttgcaacaaggtctttcataatacgattttttttgtttaagtgagcaaaagtaaaattttgcattaattgaaaacggtattgctagcaaaatattttcatgaattctcttttttcaattctttaaggaaataactgaccgaaattcccgttttagagtgaaatgcattggtgaatcggggagtggaagtaaaacctgcttcctcagcaagggagcctatcgagtaatttctatgcatgcttgagtttcggagcagttccaccaaataatcaatttttaggtcattgatataatcagcaaaacgcttgccgctgcgatggtatatcacttttgaaaggtatttgctgttagtattaaaccgtacagttaaagtggctaatgttgcctctttgtgcaggaattttttatccctttcaaatttttcaaggtgttttattatttgctgtacagtctcctgcgagatatcagttatttcgaatttatcgggtgactgtttctggaaggtgctcttttcatttttttccagaagcagatcaaatttgatcttatttcgctttttagtttcaaagtggttataggtcccataaatgacagcggagaatagaacgacaaccacgcttatcaaaataacgtcataatatttctcttttacaagttgctgctgtattttttctttttccagcagaatttccttcgtatcatattccttgtgaattttgcccattaggtacttattggtatctgttaatatagaatctgcttttaaaagctggtctatataatacaactgggatttcaggttattttctttcttgtaatatttaatcattaattcaaaaacttctcttaaatccggacgaatgtaacctttctcaataaatactttttccacctttttaaagtaaggaactgcttttgcctgacgctgtagtttccaatagttttttccaatgtaaaaattggcaattgattcatttgcaaactctgtcatgctgtttaaatgcggcatgacttcctgaagcaattgaatagaggtgtgataattatttagaaagaactggttgattccttcggagtgcttaaaaaataattccatctcgggaatcttaaggcgctcacattctttaattcccaaagcattagtttcggagcatttactgtaatctccaatcttgttgtaacaaacactaagtgaatgaagtgaatttaaataggggcggggctgattttttttaaaatattcaatgcagtcattaaaaagagaaatggcttcatcataaaatccgaggtaaaatttaatctgggcaatatgatatttggttttatagatcaggtaatcattatcagttttggaaatgttttcatttgcagttatataacaatcatatgcttttacatagtttttttggctgtaatagactattcctttggatagctgagcagatccgatcagttcattacttcttgactttacagctgtctgcaccatgctgtcagcgtattttaaacggagaatcataggtgactgatgcagcatattttgatatgcattaactaactcttcatgattcttttccctgcgggcttttcttaaataggcatataaatatggagatgctttcaggctgtcatttttgtattgataaattttatcatccagatatccataacttttaaaaataagggaatcaggaattctgttgggagtattctgggcatttaaagatttaattagaaataaaagcaacagtactggtaaattacatttcataagacatagaaattttgagtttatgctctgataaaagcataaatcagattaataaaaaaaaatgtagaggtcgttatagagcaactttcaaaaatactttaattatttgaatttcaatatttaatgtaagaaaaatactttgttgatttcatggaaatcgatagtggattttccgaaaatccacatacatgctcttgatttatgattttttgcaatttagatttgccttgaattcaacagcaaaggattcagtaaagtactgagcaaaagttctgctggcccgggtaaaatggactgagacaagttctcaattaaccaaaccattttacattatgaaaaatttattattaactggtttaattgtttttttaggttcatgttcaaatgacgattttgacaattctgatttaagattggtttccagccaagcaatcaacaaagagaaaactgcagattttaaaaatgggtctgctttagaggaaaactttaaggaagttccggcgggagattacgtacttctagttcctgcccaattaaaagaaaaaatcatttcagtattaaaagcccaatctgggcgaaatgaactaaagacttttgagaaaagcagttctgctttagatacaatttcttctacggaggatcctgtctcaacattatttataattgttgatgaaagtacactgggatcatcattgaaatttgatttgaaggggtatatcgttaatctcggaaatcttcgcggccagcagtaccagatcgtggatgattttataattcaatacgagatttcaaaaagacaggattcaacacttctaacagatgaaaaggaatccatcttatctatttcctcaatttcggaagcagttttatttagtgaaaaggacagaaaagacagagattgggagacatccaccaccagtaagagtatcaggccttaatgatgtaatgacgtaattgaagttgaattacttcctactaatatagttgattaataattttctaatctttctgatttatgaaaaagagagctttgttttatatttttttgttcctttttaatctttgcagcctttattttataatgaagctttttgctgctgatcagctggttcagtacgtactttacgaggacaatataattgagagtccgagattaacagcgtatattttatacgtctgctgtttgtctaatttatatttccagttttttacatggatggaatattttttcaagaatgaaatctaaaggagatctaaactaaaagaacaaaaatgattagagaaatcttaaatactgagattaaaagcattgaaaatgatggtattgatgtagtatacattacagactataggaaaaaaaatactgtaccagtcccattttccgtttcaaatttttcagtgcttttaatcacaagtggtaaaatgaatatcagatttcatgacgaaactaatatagttaatcggaaagatttactggtaatcccatttaattccatttgcacaagacttgaagcgacggataatatccagctttatcttgtaaggacaaattttgattttgcatttaataattgttatgagaaagagctttcggatgcttttagttttctaatgttaaaatcagatcgaaagattagtcttcaggaaacggattttaaagttttatcacttatttataaattaatgtatgtattgcagaacagcaatgacaaaccggaagtaattactaagctgcgccggatatgctttaatttatttatatatgaactcaagtttatacattcgaaatataaacccgacttaaatcttgacttttcaagaagggagagcattgtaatacaattcctgaccctattatcaatacatttaagaaaacagcatcatgttcagttttatgcaggagcgttatttgtcactccaggacatttgaataagatggtaaaagaaagcacaggtaaaacagcgaaagcatttataattgaagctcttgttaatgtttcgaaaaatcttcttacggactcaagctattccgtggctaatattgccgatgaattagaattcagcagcgctgaaaactttggcgtattttttaaaaaacataccggtatgctgccaaccgaatttcgttctaataaaaagtaagctgccaagatagctccttattctgccagagattgtttaattaaaacgataagacgatgattaaaatgtatcctttggaatggtttgattcgttgattataaattcatttgatgctgataattcttttgtaaaaatatcggaatatgaattggagaatttgagtaaagcaatagtatctgaatcaaaaaaaattaaaattcatattaaagattcttttttcgagctgaaaagtaaaaggcagattagacttcttataagaaaatatcattcttcattggtttttttaatagataaggtagtagaaataaaaatgatcgaaaaattcaattctcctgaattttttagaatatttgacctgatcgttagttccctggacgatttgctgtcatttgtagaaatcagatattcgtcctttatgagtttggaccaaagggtgtcctacagctatttttcaatttggaaaaaagaagcactcgaggttttaaagaatctgattaaaaaaaaagaaaatactggggagaatgatttagaattggagtttgttgtcgatcttcttgctgcgccacttcaaaacagcagaaagagcaagtatacctatcgccagattttgtattatcgagagataatcatggaacttgaaaaattgaacgatcaagttacggaatctgaaggtttttcaaatcttgatcttatgcttataagaatgaattttaattccagagaatataccgagagactggttaatagaataggcaggtatttagaaggttttgagaatttatctgaaagacttgaaaagctgctatacttctgcaagaaactgtctaaaataaacgcagatttaaaattaacctttaatccatctcaacagaatcttatctcatttttggaatactggttctccagcgaaatcagatttgctgaaaagaaggctgcaattctaatacaggaacagattgatggttctgtcgggagtgaatttgtggagaaggcagattcaaaacttgaatgtatactttcaggagatcagattggacttattttaagggctacagatgaggcgagaattattaaagctaagtctatgaattacatatttaaaagtatagtaccttatctttctactcccgtaaaaagaaatctttcttaccagtcagtgagaagcaagtcatataatgcagaagagcgtgataaggaaattgcgattgaaagtcttgaaaaaataatccgtaagataaaaacgtactagattttattgtctcgtgtaatctgacaaccctttaaattcgggcattttgaaagggtacaaaaagggtacagaaaagttgtacttgtagaaaatttattcttatcgttcctttgacctgtagaataaatcccatcaaaatttaacggatggtgattttcatagaggaggataaaatgttgaacgataaaatgaggagctatgtttacaaatatttcatggggcagttatctgaccgcggctggtattgctataattttctggtatctaataatcttactgaaatttcacagtagtgatttaaaaaaaatcttatcaggtgaaaagaaactgcaaataccatttctaaaaaaaacttctaaaaatttacaggaaataaaatcgatatccgattcatttccgaaatcttttgataccctggaagatgcggaaaatctatcgcgccgtattaaagaagcagttaaagaaagtgcagaaaaacgactaacaaaacagcagtttcaaaactacctgcgaatgcttctggatgaatatccttatgtcaaaatttcctccctcagagaaaacattaaccaacaaatggtctttgaatctcaaaagcaccccgatctgcttttaacgctcagtgaggcagacagtctttgggaaggaccggtattttaaaaaattcagaggaggaatattccccgttctctctggtgcggtatggctttatgtgacaggaaaaatagagcagcaacggcggtattcctcttctttttattaaagaataactttaaaaatgatttgtgatgaaaaaatgcagatggaaattaaaaagtctttttagaagatttagagctatgggatcgtcgctcctgatgattctggttagtaatgttatttacagccaggatggtgtggcgggcattaatgaagccaaccagaaagtgagaagttactttgatgccggcactgaattaatgtatgcagtaggagcgatcctcgggctgatcggggcagtaaaagtataccagaaatggaatgccggagatcctgataccggaaaagtggcggcagcctggtttggaagctgtgtgtttctggtggtggtagctactgtcattaaatcctttttcggggtttaaacgatagataagatgagtaacagtgtttattctatcaataaaggaatcaatcagagtatagaatttaagggacttaaagcgcagtacatctggtatttgggcggaggtgtcgtaggtcttatgattctatttgctgccctgtatataattggaattccttccttgatatgtattggttttattggaacggcgggaggttttctagtttttaaaatatacagaatgagtaatacctacggagaatacggcatgatgaaggctctggctaaaaaacagattccaaagtggattaaagtctgtagcagagaggtttttataaagatgtagctacagagcgttaatgatataatggagaaagaatggagaagaggatggaagatctgctgcctgttatggcagtggaacatgattgtattttgtcaaaacagggcgatgtaactatagtttttaaggcagaactgcctgaaatttttacgctgtcagaccaggagtatgaagctttccaccaatcgtggataaaggcgttaaaggtgctacctaagttttgtgtttttcataaacaggactggttcttagaaagtgcttataaagctaatttttcaagtgaagacagcagttttctgaccagaagcagcgagcgtttctttaatgagagaccctttctggatcattcctgctatatcatgctgaccaagaaaccagcgggaagaagaaatgcaacctcattgttttctaatctgcttagaagttccatagttccagaggaaacattaaaaccgcagcttttgcaggattttgaagatacctgtggccagtttaagagaattatggaagacagcggatttataaagctggcgcgtctgcaaaatgaatcgcttagaagcgagagcagaagaatcgggctggtggaaaagtactgttttttgtcagaacgtgaagattcatttgtttttaaggatatcaggtttgacgaaggattagcagtaggggataaacgctgccaattgtttacacttggtgatgcagctgatctgcccggattatgcggatcaagaattaattttgaccgctattcgaccgataagaccaaattcagcattggttttgcttcaactcttggtcaacttttatcctgtaatcatatttataatcagtatatcttcattgaagacgcacagaaaaccattcaaaagctggaaagcaagcgactcaggctgcagtcactctctgcctacagccgggagaatatgattgccagggatgcgacgaatgatttcctgaacgaggcagtatcacagcagaggcttccggttaaagctcactttaatatactggcctggagcactgatagggaagaactaaaagagattaaaaacaaggtgtcatcagctcttgcacagatggatgcggctgccaagcaggaaactgtcggagctcctcagatctattgggctggaatttcgggaaatgctgcggactttcccatgaatgacaccttcgacacctttaccgaacaggccgtatgctttctgaatatggaaacgggatataaatcttcgctgagtccctgcggtattaggctgggagacaggctgacaggaaaaccagttcatgttgatatcagcgatgagcctgttaagatgggaatctgcaccaatcgcaataagtttatattgggaccttcgggcagcggcaagtccttttttaccaatcatatggtgagaagctattacgagcagggaacgcatattgtactggtggatgttgggcacagctataaagggctctgcgatatggtaaacgggtattatttcacttacgatgaaaagaatcctatccgttttaacccattttatatttcagaaggagacagtctggatacggagaaaaaagagagcattaaaacgcttctgctggcactctggaaaaaagacgacgaaacctttaaccggagcgagtatgtagcactctcaaatgcgctgcagctgtattacgagaaattggatgttaacagaaatatatttccctgtttcaatagcttctatgattttctgaaagaggattttatctcaattttggaaggcgataaagtaaaggagaaggactttgacgtgaataattttctctatgtactcaggccttattacaagggaggcgagtttgattatctgctgaacgcgacagaaaatctggatcttctaaaagaaaggtttattgtcttcgagctggataatatcaaagaccatccgattcttttttcagtagtgaccatcataataatggaagtttttataaacaagatgagaaaacttaagggtatccgaaaaatgatacttattgaggaagcatggaaagcattgatgaaggagggttttgcagattacataaagtatctttttaagactgtgcgtaaatttttcggagaagcaatagtggtaactcaggaggtagaggatattatttcttcaccagtggtcaagcaggctattatcaacaacagcgactgcaagatccttctggaccagagcaaatatcagaataagtttgaccagattcaggagctgctgggactgacagacaaagaaaaggcacttgtactttctgtaaataaagccaatgatccagctaggaaatacaaagaagtgtttatctctctgggagggatgctttcaaaggtctatagaaccgaagtttcgttggaggaatacttagcttatacaacagaggaaagcgagaaagtgaaaatgaatgcctatgcaaacaagtttggcggggacataaagaaaggaatagccgcaatggctcaggatatgagaaatggaattaaatgaaaaggaaaaatgaaaaagaaattaattgtcggtttagtctgcctgctgctggtaagcacctcggcaagacctgctgaaaaagttgcggtattgccgatactggaaattgtaaaagctgttacgaaaaaggtgattaaagccattgacctgagaatccagcggctacagaataaaacgatctggcttcagaatgcacagaagcaggtggaaaatgtactttccaaattgaagctcaatgagatctcggactggactcaaaaacagaaagatctttacaaaggctactatgacgaactcgcaaaagtaaagtcaattattacctactatcagaggataagagagattaccaaaaagcagacacagcttgttcaggaatatgaaagagcctggaatctttttaagcaggatacccattttaaagacagcgaaatccagtatatggagcgcgtttatacaggaatacttgaggaaagtgtgaagaatatcgaccagatttttttgattctggattcttttgccacccagatgagcgatctcaaacgtcttgaaatcatcaacaaggctgctgatcagattgatgggaactacgacgaccttacaatgtttaaccagcagaacatactgctgagtcttcagagggccaaaacagaagcagatgtaaaccaagtgaaacaattttacggaattccataattcaataaaaaaaacatgaaaaagatagctgtactactagtagcgctctgtgtttttaatcaaagtatgagcgggcaggcaaagcagaggaaggaactaatccttcaaatagcggcacttcaggtttatattgactatgcaaagaaaggatattcggcagtatcaaaggggcttaatttcataggtgatgccagaaaaggagagctaaacctgcacggtgattattttacctcacttttaaaaatcaatccaaaggttaggaattattataaaattgctgagatcatttccatgcagtttaaaataatgaaactctgtagaaagactttggcagatcttaaaactgctgatttgtttcatggtaatgaactggactacattgaaaggtctttcgaaaagctgctttggagctgcaaccagactctcgaccggctgctggttattactactgatgcagaattggaactaaaagatgaccagagacttgagcgcattgatctgctgcacaaaactatgctggaggattataatttctgtctttctttcagcaatgaagccagactgctgtcgatttcaagaactgccgacaaagaggattctaaaggattaagtgaattgtacggattataaacttgcaatgatgaaaaagatattattgtttatggcagttatctgcctatttctgactccagataaatcaatagcgcagtcagcagaaattcagcagctgattttgaatatcgaaaagctatcccagttcaagaaaattcttagtgacatgaaaaagggatatgagctgctttctggaggatacaaaacggtgaaagatatgactgaaggaaacttcagtctgcataaaacttttctagatgctcttatgcaggtaagtccagcggtgaggaattataaaagggtaggagagatagtggaatatcagatttcaatagtcaaggaaagccgcaacggaatgaaccgatttataaaaaacggaaatttcagcggacaggaaataaattactttgagaaagtgtacggaaacctgcttaatcagagcctgcgaaatctcgatgaacttacgatgatcataacagctgataagctcaggatgtcggacgacgaaagactaaaggcagttgacgatatctatgagcagatgcaggataaactgcttttcttaagaaactttaataccacgtcgaacgtgctggctcttcagcgggcaagggagaaaaatgatgtttacgcgtcaagaggattacaggcaattaaaaactaactaatgaagatgttattaaataaaaaagtagtatcagcggtgcttatggcattagtttttccattcaggatcatggcgcagggacttggtgatgatatgagtagtcttcatggggttttagaccagctttatgatcaaatgatgcctttgtgttctaacctaattgctgtagggcagggaatagcaggctttggaactatatggtacatcgcctcacgggtgtggaggcatatagcaagtgccgagcccattgacttttatccgctcttccgtccctttgttataggattctgcattatgatttttccgtcggttctggcacttattaacggagttatgaaaccaactgttacggctactgctgctatggtaacaggctctaacaatgcagttgctgttctgcttaaagagaaagaaaaagcaattaaagaaaccgatccatggaagatgtatgtaggggctgctggtacgggtgatcgcgacagatggtataagtatacgcatgacggtgctgatccatcggatgagagcatgctcgcaggcataggcaatgatgtcaaatttgccatggaaaaagcttcttacagttttcgaaattcggttaaggaatggctgagcgaggtgttgagggttttgtttgaagctgccgccttatgcattgacacccttcggacatttcagctcgtggtactttccattttagggccgctggtatttggaatagcggtatttgacggtttccagcacacgctcactgtatggcttgcccgatatatcaatatttacctgtggcttcccgtggccaatatattcggaagcataatcggaaagattcaggaactcatgctcaagctggatctctcacaggtgcaggcaacaggtgacacttttttcagcaggaccgatatgtcatatttaattttcatgataataggtatcataggatattttaccgtgccttctgttgccaattatatagttcatgcaggcggaggaggagccttgggtcataaagtgacaagtatgtttggcaattcagctagttctgttgtgagaacctcttcaaatgcggttggaatgactgctgatgcgatgggagatgcggatcggagaatgaccagcagcatggctgcgacagcaggaagcagtccttattttactgataaaggaaactatatgaatgacaggcttaaggggaattctaaacagacttaataacaggagcatatgtttaccaaaatgaaaaatattgatacggcatttagatatgtgagaggcttcacgatgcttgtaattgcaggttgcatcataataagctgctatgctgtctataaaagtttccagacagtgagccttatgcaggataaagtatatattctggcaaacggcaaagcgctggaagcttacgcttcggaaagaaaagataatattgctgttgaagcaagggaccatgtgacaacctttcacaagtttttctttacccttgatcctgacgataaggtcattaaaaccaatattacaaaagcgctatatctggcagacgacagtgcaaaacggatttatgatgacctgaaggaaaacaatttttattcgggtattatatcaggaaatatcagccagaccatccagattgacagtgtgagcattgatatccgtgaatatccctaccgttttagatgttatgccagacagaacattatccgtactaccagtattttgaaaagaagcctacttacagaaggtgcgcttcgcaatgtatcaagaagcgataataatccgcatggttttcttatcgagcggtttaatacgattgaaaacaaagatatttccgcagaaaccagaaaatagagatttatgaaatccttttttacaaggcagactgagccttttgtgtatcacaagtattatctgctattgcagaaaagatgggcagaaaaaatgaagagagtcacagatgggctctctaaaacaaaacttatctggggacttctgttctttacggttttgacatcgggttatttaatctataacctatatagtacattttataaagaagctgaggtttcaacaacttcaaaaattaagacaatcaacttgaaaaaataaaattatgcaagagaaaacattatctccaaaggagtctaaaaagagaaagatgcttttaatgctgcctcttataacatttccatttctgacattcttattttattcattaggcggcggaagaatggaatccaagatggcagggaacgatgaaaagaaaggattcaattttaatctgccactgcctaaatttaaagaagattcagcactggataagatgagctattacgatcaggcggcagttgattcgataaaactgcgagagcagataaaaaaagatcctaactatattgataataaagtctcggaagataaagcagattctttttccacaagtgattttgaatctcggatgcttccaaaaaacagatcggcttttaattctcagtcttttcatgaccgtaatgaacagaaagtttatgagaagctcagggctcttgaaaaagtaatcagccagcctgctgccccgacttacggtcaggatatgagggaatttgagaattacggcacatctcgtggagaatctgaagaaattagaaaactcgaaggtcttatgtcagccatgagcgcacagcaggaacctgatccggaacttcagcagttaggcggtatgctggaaaatattttggatatacagcatccgcagcgcgtgcaggatagacttaaacaaacatctgagagcaaaaaaggcaaaatatattcagttcagaaaaaagaagcagagaataacataagctcacttcagcgaaatgtcgattggcagacctctttgaaaacaaatgaattttattcactggacgaagcacagcctgctgaggaaatacaaaattctattgaagcagttgtgcatcagacgcagactattgtcaatggctcggtggttaaattaagacttacgaatgatatttttcttcaaggaacaattatacccagaaatacttttctgtacggtatggcggctttaaaaggagagaggctcgaggtaaaaatcacaaacatccagtacaataattcgatatttcccgtcgagctggctgtctatgatatggacgggattgacggcatctatattcccggaaccattaacagggatgtggctaaagcatcagcggacagatccattcagactctaggtcttaccgggatttcggattcatggggagcacaggccgctggtatgggcatcgaggcagccaaaagtcttatgagcaaaaaggtaaaactaataaaagtggttgtaaaggcggggtatcaggtgctgctgtatgatgaaaagcaaaagaatttaaaaccttaaaagagagaaaatatgaaaagagcgaattatttgtttttaatcagcttgctgttagtttgtgtttcagttaatccacagtcaaacgcaaaggaaactgccttttacgaagaccagtataaaaatctacaagtaggtttttctaaaaccacgagcattatttttccttatacaatcaagagcatagataaaggaagcgcagaagtgcttgtacaaaaagcaaaaggagttgagaatatactacttgtaaaagctgctaaacaacattttttccagaccaatctgacagtcgtaacatctgacgggaaattgtacgtttttgtactgaattatgatgaaacgtgccctgacttaaattttaaggctgaaaatgcagtggctgcaagcagggatgtgctgttttctttagaaaacgaaaatcagaaaagaattgaacagtgtgcttcggctgcatattccaaaaagaaaaaaatcagtggtctaaaaaaatccaagtatcagatcagactggaggtgaacggcatctttatccagcaggatgttttgtatctgcgagttgtttttgaaaacaaatcaaagattaactacgatattgatcagtttcgtttttttatcagggataagagaaagtcaaaacgaactgcctcacaggaaattgaattggagtctttgtatacaacttcgtcatctactgtaattccttataaatctgaaataataaaagtctatgcgctggagaaatttactatacctgagaataagtatctaaccattcagatgattgaaaaaaacggggggcgaaatttggaagtagatataagtaataatctgactaatctggtttttccgatttccgaattaagcagtgacactttttaaggtttaaaataaattatgataatcaatttagctgacactgaaatgatgctgtcgtttgctgaggaaatggcttataacggccatcgatttgccgcctttaataccgatgaggtgactgataccgacacaattgagttttttagaaacccattggatgcgaaggagtactgtctggttatgaccaatgatgctaattattttcagagcctgccggttgaatcagttattgatgacttacgagcagttttagagagcggaattaatacgtccgataatgaagcttttgaacttattggatttgccaagctgtttagggagaataaagaaatattacataacaacttaaagacaaatattatgaatcagaaaaattttgaattcctgaaagaccagctgaaatacactggttttggagagacgtttgatgctgaacttagagagaaaatgatgaaaggtgatcaggattttaaaatcatgcacaccggcattatgaacaatggtgttccaaataacgatatcctaactgtagatttaaatttcaaaaagtctgagcagaccgatatgtatttttttaattcctatcacgtcaatctgcagaaagaagagaacaagcctggtctggaacacaccttttacatcaacaaagacagcgccagtattacaatgaaagaggcttataatttgatggaaggcagatctgtcaataaagatcttaaaaataaagaaggggagagctacaattgctggttaaaaatgaacttcaaagaatcagattctcagggaaattttaaactcaatcaataccatcagaactacgggtatgatctggaagcaagtctggcaaaacattcaatcaaggaactgaatactccgaagtataaagaagaccttttgaattcgctaaagaaaggaaaccttcagtcggcgacttttgttgtcggcggtactgaaagtaaaatgtttgtggaggcaaatccccagtttaagactgttaatgtttatgatgaaaatttacaaagaattaatcatcgagagagcaaggaagaaaaaaaggctgaatctcaaaaagaatcagtatctaaagatcaaaaaaaaaatctagattctgatgaaggtgattcagggaggaaagataataaagtaaagaaaagaaaaactccttcactttaaaagttatggaaaaattaaagcctttatcggattttttcatcgcaatagagaatgattaccggattagtccgatgcatattgccatttatgcagctctattacaatttagatccgttaagggctttattaatccaatttttgtctttagctcggagattattgttattgctaaagtttcttcagcaaatacgtatcataaatgtgtccaagagcttcatcagtatggatacataaagtatagaccatcttttaaaaaaaatcgtggaagtgaagtatattttttgttttcagctgacgcggacatctaaagattctgcaattaataattttatgaaattgtactatgaatgaaattgtaaccaaggaagatctgagacagtttggtcttcttctagtagataaaatagaggctgtatttaaagataaggattctggacggaaagaaactttggaaccagagtggattaaaagcaagtctgtgagaaaactgcttgatatttcagcaggttcagtacagaatcttagaacaagccaaaaagtccgtttcaaaaaagtgcttggctcgtattactacaataaagaagatcttcaaaaactatttgatgatgataaacactaaaagattaaaagaaagctatataatgagttatctgtcaatgtatagtaatgatcctaaactaaatgtctggcatctatcaattttgacagcaatactgggattaggctataggcagggacaaagaagaaggattaaagtcagccgcagtaaaattatggagctgtcacatgtgaatacgttaccgacttatcataagtattttaaacagcttcaggatttaggatacattaagtacaccccatcttatcatcccggatataaaagcgaagttaagttatgtaaaaagaggctatctcaaaatatttgagatagcctcttttaagtttaaagatattttaaaattatttatcatgaagaaatgttgtatttctttttgattgcctgaatttccttttcgagcctgctgagaaccgtcaaatcaggcttagacattttggacccagttttattgagttttttattgagaatagacatttcacgtccgattgtggcttgctcagttatagcatatgcctcagtctgttttaccgatgcatgacccagcagttctttaactacattaatagggacgttgttatttagggttaccgtgcttccgaaagtccgacgagccatatgagtgttgagcgtaaaaggaaaaccgcacaataccgcaacttctttcagatactcgttcatcttctgatttgaagaaactggaagcacggtaccgcgctgaatacagagaggattgtctttatacttttcaattatttttagtgcttggggaagaagagggacattaaatgatgaattggttttctgcctttcagacataatccacaggtttccgtcaataccttttttgatatcagtcttttttaattggtatgcatcgatgtaagccagtccggtgtagcattggaatacaaatacatcccttacgacattaagcctgtcagttgtgaaataatgactctccagttcgtacaattcctgtgcggtgagtggtttttttaccagttttgttttacgtcccttaaagttcttaaatgggtccttggtgattaactccttatcaatggcgcggattacaatctttttgaaatttgcaatatactttagggtggtgttgttgctgcagtcgcgtacagttctaaggtaaaactcgaagtcctttacaaactcaagattcaaatccgcaaattcaagatcgtgctttttaagcttgaattttataaaagcagtcaaatggtttttagtaatggtaaaccggtcaagggtgccttttgcatagccttttccaagaagcgcctccatttcatcattatgcttttgaaattcttcgagcaccttaatctttggcgctgtccttcccaagacctcgtccataattttctcagcggttatggttttgccgctgtacatcatttcggttttgatttcattgatttttaaagtcagcgaatccaaaaagaagttcagcgactttgcatcttcctttgagccgaccgctctttcgaacctttgatcccatcgtgtattatcccattttctcttagttgaactttccttacggataccgtcaacagttattctgaaatatacgatccattctttactttctattttgggtctttttaaaaagaatcccaaaccaaaactgctttccaacataatcctactttttaaattaataaatgtagaataatattactgtcaaatcaagtcgttaatctcgttaacccctgtaatatatgggatttttgctgtttctggtgcacttttctgcgcaccggaaagtgcaccgattctgcacctttaattttgtgagaatttataaatattgaaaacaggccttaaagcaaaaaagccagtaaatcatcggatttactggctttaagacattttttgtggctttttgaaaagattgaaaaatttaaattttcatgcttttcggcctttccgtggggagagcaggattcgaacctgcgaagttcacacagcagatttacagtctgccctcgttggccgcttgagtatctccccgaaggctttgtattgttgcgctttgttgttctaagcggttgcaaatataggaaggtttttgatgtttgcaaacaaaaaatgcacttaattttaagttagttttacattgtttttttaattcgttggaattgaataaagtaaaaataattttttttaggtgttttttttaaagtagggttatttttacaaggtacaactgattatttgtttgttttttggttttttaaaacgttttaaatactgtctcttctcggaaagcagtagcaaatactagttaaatcaaatcaatctattctcaaatgtttgacatttgttcacgtggaaatctgaagcctgatgtagatagataggtttcgatcttcttttggtaggttgtgtcttcaaactttttcagatagtttttttctttgaaattaagcgctaatttttttatttgtgaataggttaaaagaaaggttgtttgtgtcttaaatgaaggttattgggattgataagatgtgttttgttttttagtactaaagagtatctcttgggattggtcttttaatctggcagtaaaatataaaaacaaaaaaatctccactagggagatttttttgttttatttctgaaaggaaatattatttggctaaaagctcaattatttttgctcttaattccggacctcttaaatcctgagcaactacttttcctgatgcatcaagaataaaagttgccggaatagattcaacaccatattgttttgcaattggctcatcccaaaattttaagtttgaaacttgcgtccaggttagtccgtcttttgcgatggcttctttccaggcagcagcctctttgtctaatgaaactcctataatatttaaacctttagcatgtaattctttgtaaatagctaccacattagggttttcttttctgcatggaccacaccatgatgcccagaaatcaacgatagttactttgcctaagctttctttaagcgaaactacttttccttgtggatttggagccgaaaaatctgctcttcatttagggcttccaacaggagctgctgatgcaccaactgcaggatttttcatttgtcctagtttagttttgatttcttttccaggagtagagttttttaaagactcgtctaaagagttgtataaaccttccgcttttttgatgtcagtgcttgggtcattaatcatgctttgaataattaaagcagagataaatgcttttgggtgagtctcagcgtaagctaaatatttctttttagagttttcctgaacttctgtttgaagtgtcatgtattgtttcatcaagctattgatcgttgcagtatcttgagcttgttgagcttgttgcattttttgagtgtttttcttttggaaatcaactaaacctttttgagtttttgtcatatcctcattgaattttacatactcgtcattgttgtaagtacctgaaattttagatttgtggatactgtctttgtcaactgcaacagtaatttctcctgtttctaagatgaatggaattgggccattagctccctgaacaattaaagtatgaaaagctggttctgttacttttcctttaatttcgaattttccgttttcaacttttacggtgtcaagagatacagccatttttgttgttggatcctgaccttgaagaatgattgtttttccgttttcgataccggttgcagttcctgtaattaggtattctccgtctttaactttgctgcaagaaataatcgctgcagaagcagttagtaaaaaaagtatttttttcattataaaaaattaattagttaattgatttgtgcaacaaaagtatttaaaattataaaacataaagaattttggaacctaaaattttgttattgtttttttaggtttaattgtcatgtaatcagaaggtttttgaggtttatttgatttaaaactcttaattatatcgttataatgaaaataaataacgttttttttaatttttacgcataaaaaaagcactctgttgagagagtgcttttgtagatattttggtataaatctattcttgattcgttttctttctccatgtgaaagaattaagaatgtgtctttttgcaaatcttccaggagaatcagcatttaccattttaacgtaagttgctttaggaacactaatgtattcgtaaacacttccgttagagaaatcgataattaaacgaccttcaacaaatttataatcagtaattgaacaagtcgaaatcgtttcagtgtattctggtaaattaagtttaatcgtttcaggattaatacttaccaagaagtgataagcctcaataatagctttacttttttcttctgcagcttttagaccagcatcatcaccttgaaatttatcaggatgagattctttcatcgcattacgatagattgtttttaaatcttttaattcagcagttttgtctacgtttagtaacttgcggtattcaactatttttttcataaataaaaggtaacttcttgtctattagtttgaaatgattgttttttacttcaaaacgacaaattttttgcaaaggtacacttttttttaactttttacttttgagcggaaaaatatttgtttttgtttgaggtttatgattgcggggtctgagtagtagaggtacttaaccgcaaaaaaacgtaagtttttttgcggttaagccgtactccaaaagcgaagttcgcaaagcttcataaataaaaactttgcgaactttgcgtaaatctttgcgttaaaagtgacctgaaacctaaaacctgaaacctaaaacttgaaacctgaaacctgaaactaatctttattacttgttctccggtttattattagccttatcgaagtttttagatttttttggatacttatcatagctaatatcgcttgggttttcgatgatagatttaatcgtgatccaatcccctatattaaagttagtatgtgcgattttatagtctaaaaggtactcaccacaaaaatagttgttgttttcatctttttctatgatgcccgtataaattcctttttgcagcattttcccttgtggatctttagacataattttgtttgttttaaaattgaagttgcaaagttaatcattattatgtttgttttagggagttcttgacaatctcagtatatttgcacatgcaaaaaaacttcaaaccacatcctaattcctttaaaaatacgttttgtgtttttcatgaagtactttcagataaaattgaaggtttaaagaagcagtttgagagcaaagccggaagcgcttattattatacggaatccggaatgtaccgggtgtcaaatcattggggaagactggccaacagcaaatggcgtttggtagcaatggtaccggaaactgcttcgaaaactaaaataggttttgcggcctggaacgaattttatccggataacgctgaagaaaaactgtactatatcgaagctgactttgatcagaatctggtcacctatcagcataagaagaacccgaattatgatgaaaaacctattttaagaaccagttttgaaacaacgaaacgaataaaacaggttcgcaacctgcaacaactcacttcatgggcaaagcattttgattatgaagatattgatgagctgagaaagcaaattattaacgagttgatttataccgagaaaactttagacgaaattaaaagagaaatataatgggacgcaacaacgaaaggaacatcaaaaagcataacgacaaattgcataaagcccagaacaaagtaaaacaggctgagattgcacgcaaagaaaagcttaaagaaattattaaaaagttcaacgagaataaagaagaataaaatgtatcagattttaggttccaataaaaaaacctgaaacttgaaacctgaaacttgaaacctgaaacctgaaacaaaaaataatacactacagatgagtaaatacgaagatttaaaagcaagtgtgcaggaaattattgatttaattgctgccaagaataatagagaagccaataataaattgcttgaagtaagtgataccttagatgatatgttggatcatgctgaagaagatgaagatttaagagaaattagcaggtatcaggttttattgaatcagttgcatgtaaaaattaatggagaagagcaggctgatggagagtaagaagtgcttttgtgatactggattatggttcgaaaattgttgtggtcagtatcttgaaaacaatcaaaaagcaccaacggcactagctttaatgcgttccagatattcggcttatgcctgtcacaaggcagattatctattagaaaccacttatatttcggaaagaaaatactattcgaaggccgaaattttaaaatgggtaacagctaataaatggcagagactcgagattttaagttttactgaaaataccgtcgaattcaaagcctatttcttggattcagaccacaaaccacaagtgcattatgaattttcgacttttaaatttgaaaatgaagagtggttttatgttgatggaaagtttgaataattgtcagacctaacactgttagttgttagttttggttagatattttaactaaaaattaataaacgtttcgtttttcataattctaaaataacgtaattttaaaattatgaaaaacgaatttaaaaaaggtttttattttaagtcgtacgaagctccgtttcagtctccgtttgaaaagctttttggtatttttaaagagctgatcacccatacttcgggtgattttgacgaagcaatcagctggttaagggagttagacatagaatacaaactaacagacgagaactacactatcgatgattttatcgaagatttaaaaaagaaaggttacataaaagacgaagttaaacctgacggaagcggtggttttggtattactgccaagacagaacgcgctatcagacagcaggcccttgatcaaatttttggtaacttaaaacgttccggaagtggtaatcataaaaccaaacatgccggaaatggtgacgaacatacgggggaatttcgtgaatttaattttggagatggtttagaacgaatttcattgacagaaagtctgcgaaatgcccagatcaataatggtgttgaaagtttcatgctaaccgaaaatgatttggtagtagaagaaactcaatacaaagcgcaaatgagcaccgttttgatgatcgacatcagtcacagtatgattctctatggcgaagaccgaatcacacctgcaaaaaaagtggccatggctttggccgaattaatcacaactcgttatcccaaagatacactcgatattttggttttcggaaatgatgcctggatcatccctattaaagatttgccctatctgcaagtaggaccttatcataccaataccgttgcgggacttcaattggctatggatattttgcgaagaaaacgaaataccaacaagcagatttttatgattaccgatggaaaacccagctgcgtacgcgagcgtgacggttcctattatatgaatagcaacggactcgacgagtacatcgttgataaatgttatacacaggcacagcaagccagaaaattacacattccgattacgacattcatgattgcaaacgatccgtatttacagcgttttgtcaaccattttaccgaagcgaatcagggaaaagcattttacaccggattaaaaggactgggagagatgatttttgaagattatgaaacgaataggaagaagagagtgaggtagtgtttagtctcggtcgcagtcgcagtctcagtttcagtctcagtttcagtgacggtgtcctgctgagcgaagtcgaagcataagttgcagtgacagtctcagttactattgtccttctgagcgaagtcgaagcgggagagaagcaagaggccattaaaagttttaaaaaaaaacaaattagaaatttttcaatcagtaaaaatggaaataaaaaatataaaaacattaggacagttaaaagctgttggttacaaaagtagcagtattaaagacgaattacgcaataatcttcgggagaaaataaagtcaggaaagcctgtttttgaaggtgttcatggtttcgaaaatacggtaattccggaattggagcgtgccattctttctcgtcataatatcaacttattaggacttcgtggtcaggcgaaaacacgtttggcacgtaagatggttgaattgttagacgagtacattccgtttgtggcgggctcggaaattaatgacgatccgttaaatcctatttcacgttttgccaaagatttaattgtggagaaaggtgaagatacgcctatttcatggctgcatcgcagtgagcgttttttcgaaaaattagctacacccgatgttactgttgccgatttaattggagatgtcgatcctataaaagcagcaaacttaaagctttcttatgccgatgatcgtgtcattcatttcggaatgattccgagagccaaccgctgtatttttgtaattaatgagttgccggatttacaagccagaattcaggtcgctttattcaatattttgcaggaaggtgacattcagattagaggatttaaattgagaatgcctttggatatgcaatttatatttacagccaatccggaagattataccaatagaggaagtatcgtaacgcctctaaaagatagaattggttcgcagattctcacgcattatcctgaaagtgttgccgttgcaagagctatcacagagcaggaagccaaactggatgaaacacagcacaaattagtttatgtgccggcgctggccagagacattttagaacagattagttttgaagcacgcgaaagcgaatatatcgataataaaagtggagtaagtgccagaatgagtatcaccgctttcgagaatttaatgagtacagcagaacgtcgtgccttaaaagccggagtagataaaaccactttgcgtttgtctgattttgtgggtattattcctgctattaccggaaaagtagaattggtttacgaaggagagcaggagggagctgccgtggtagcacaaaatttaattggtttagccatcagaactttatttccaacgttattaccgcgaatagagaaacttgaaaaaccgggagaaaaaacaccttattcagatgtgatcgaatggttttttgccgaaagcggtttcgaattgttagatgatgcttctgatttagagtatcagaacattttagatgaagtaactccgctggatgttttgttgaaaaaatatttgcctcaactggataaaaaagatcagtatttcatgaaagaatttattttgtggggattggtcgaatacaaaaaactgagcaaagaccgttttgctcaaggacatcagtttaaagatatgtacggaagttatattagtaaattgtagtttatactctattttttttacaagccctacaggtatatgcaaacttgtagggcttattcttttgtaaaaagcccattaccagttttatttcatctaccttgctccgttggctgtatttgcagtttcccaaaataaaaatggaagatagtttcgaagatttgattgcgagttatatagaaaacaaggttggaatatcagagcattttttaagtcctgaactggccaatcatttaaagcaaaatctaatagatttaaatcgtaaaagtttgttgctggctgcaggaatcggaaactcagaaaagctgtcttacgatggagcggtacgcagtgactctatttattggctggataaaaaacacaacaatgtttttgaaaatgagttttttgataagatagatgcttttatagtgtatttgaatgaaagttgttataccggaattacgggttatgaatttcactattctttatatgaaagaggcgatttttatctgaagcatttagatcagtttaaaaacaattccagtcgaaaatattcgatgatcagttatcttaacagcaattggcaagaaagcgatggtggagaattaatgatccatcaggaaaataacaatcaaaaaattgcacctacgcagggaaaaacggttttttttaaaagtaatgaattggtgcatgaagttctggttacccaaaacaccagaatgagtattacaggctggttaaaaagcgactaaaatcgtttatcattatacccgacaagttttaaaaatctgtcgggtttgagatttttttaaaagatattgatatatcaattatatttgtatcaaataaaaaaagtatgcaactcgaaaatccaaccggaacagctctgtactccttagagaaagcaataaaagaatatcgaagactggcacaaaaaaacattaccaaggtcgtaaaagatattaccgtcgatcaatgtctggtcttaattatactaaacaacaatccggacatttcccaaaatgaattggctaatcttgtatttaaagacagtgcttccattacgagaatgattgaattaatggtgaaaaaagaatatataagccgtacaattcaccctgtggatcgaagaaaatttaatctggaaatcactaaaaaaggaaaaaaaacacttgacgatatacaacccgttattaagattaacaggcaaacggcattggagggcttgtctctggaagaaatagcgttattggataaaacactccataaaataatcattaactgtaaaaacaattagcatgaaatcaggattaacactaatcgtattgttggtatttatgtttggatattcacaaatggggcttagtatacaattagaaaaatacatggatgcacaatttgcagttaatgattttagcggtacagtattggtttctaaaaacgattcgatacttctaaaaaaagcatatggctttgcgaattatgagtggaaagtaaaaaatgtagtcgattcaaaatttagcctggcttcagtttcaaagcaatttacggctgtagcgattttgcagttagcggagcataaaaagttatcattggaggatcaattgagtaagtactttgttggtttccctaaaggtgatgtcatcactttaaaaatgatgttaagtcataattcaggttttcaaatggattttgatgaactgtatttggtaagaacagatctcaataaagattctgtttgtacgtatctggcaaaaaaacctttgctgtttgagccgggaaccagcacagcctacagtaacattggatactatttattagcgcgcattgttgaaaaagtatcgggacaatcttatgaagagtatttaaggcaaaatctgttcgataaagctaaaatgtacaattccggagtttctactagtgatgctgtagtggataaaatgactcagttgtattatttcaatgataataaattaactaaaaatccatacatcaattggaatttcaatcgtggtcatgatggtatatattcaactgttgaagatttaaatttgtggaataaagcacttttcgacggtcagactttgctatcagaggaatctaagaaaaaaatgtttacatcgtataatgaacagaactttggttttggcgtaataatcaaccctgtttacaatcagggacatcaattaattgcgcatgatggcggtttctttggggcaatgacatcctttaacaaatttactgtcgataaagtttttattaccgttttatccaacaaccagtcaaaatcgtattatattgcttatggccttgcgggaatatgttttgggaaagaggcagagcttccgtacaaacatattcaggtggctggagatgcgaaggcttacgatcaatatgtaggggagtatgagaatattaaaattgtaaagaaagagaacaaactgtattatgcgggttctgctatcgaattgttgccggaatcacaaacaaagttctttcgctcagataataataatacgacagtagaatttattaaaaatagtaaaggaaaaattatacagttagaaattaaaaaggctggaataaaagaaacaaaaaatagaacaaaaggagtttaagcgttatttttgcattcaaaatataatcctatgttgtttcttatcctcagtattttatgcagtgtaattgttggtgtgatttttaaaataacgcgaaaatacaatacacatcccactcagattattgcgttcaattatattgtggctttagcactgtgttattttacttttagcccaaatctaaaggaagttgatgcaaacgctccctggaacatttacattgcgattgggatattattgccggcagtctttttgtttctggtagcttccataaaaaatgttgggattgtgaaaacagatacagcccagcgattatcattattcatcccaattctggcggcctggttcatctttaaagaagaatttaatacctataaaattatcgggttactaattggctttctggcgcttttactcatcttaaaaaagcaaccggatactacagagaataaatggatttatcccgcggtggttctggtaggttttggaattattgatattctcttcaaacaaatcgctctttatactactttgccttatccaatctctttgtttgtggtgttctgtatcgccttagcagtagcgtttttaatttcgatttatgaaataggcataaaaaagaggaaattggactccaaaaatatcctttttggtgccctggtggggatttttaatttcggaaatatcctgttctatttaaaggcacataaagcatttgctgaaaacccatcgacagtctttgcaggaatgaacatgggagttattgttttaggaagttttgttggtttgctttttttcaaagaaaaattatctaaaattaactttattggtctctttttagctttaatagccatcatttttattgttatttctcagtttaaataaattttttcataatgtattgtgttgattaacagttattatttgttaattttttcattttacaaaaataaactctactaattctatagaatttataaaatatattttatagatttgcaataacaatgaagaactatagtcaaaatatcatctcatctttatgtggcttcacgatgtgtcgcatgcaggactatgtgatgaaatggcgttgatagagaaatttacttgttatttttttttttagcctttcatgcaccaatgaaaggctttttttagaactggaaaaaaagaaacaaaatgagaaccaagagaaataccagtgttatgatgcgacgctgttttaggaaaatcctatgttagagtaagtatccataaaccttagaaaaaaattttgtaaaagataaaatataataaccccaattaaacgatataatatgagtgcagaattaataaaacagaacccctttcaatccatgattgatcgttttaacattgccgcagacattcttagattagacgaatcgatcaggcaaaaactccagcgtccggaaaagcaaattgtcgttaatttttcaattaccctggacaacggttctgaaaagaactttgaaggttatcgtgttattcacaatacggctttagggccttcaaaaggtggaatccgatatgataagggagtgaaccttgacgaagtgaaagcactggctgcctggatgacctggaaatcggcggtaaccgggattccgtttggaggagcaaaaggcggaattatttgtgatcccacgacactttctaagaatgagttagagaaaattacaagagcttataccaaagctttaatagatattttcggacctgaaaaagatgttccggctccggacatgggaacgggtcccgatgagatgggatggttgatggatgagttttcgatacttcacggcaaaacaattcacgcggtagtaactggaaaacatttgcattccggcggttcattaggcagggtagaagcaacaggaagaggggttagtatcatcactttattagcccttgaaaaattaaaacttagacctgcaaaatctacggtagccattcagggttttggaaatgtgggattgcattcggccttatttttatttgaaaaaggacttaaagtagtagcggttagtgatgtttccgaagcgttttacaatcctgaaggacttaatattcctgaattgattttgtactacaatttgaacaataaaagtattaaaggatatccgaattcaattgctattaaacatgaggatttattgttgttagaagtggatgtattgattcctgctgccacagaagatgtgattacacaaaagaatgctaatgatattcgcgctaaaattattgtggaaggtgccaacggaccggtttcttccgatgcagataaaatactacacgataacaatgttttagtggttccggatattttggctaatgcgggtggcgttacagtttcgtattttgaatggcttcagaattcgctactggagtcctggagaattcatcagattaatacacgcctagaggacatcttagaaaagggatttgagacggttttcagaattgccgccaaacataatgtaacaccgcgcattgcagcttatattattgcgttgaaaaaggtagccgacactcaatctgtaaaagaagtggcgctggatactccgaaatttaagcagaattaaaaattagatttttaatagtaaagattgttttcatcaattaataagaagattttcagctgaaaagaacttgttgcttgatgaaaatgtctttgtttttataaggatatagaagtactactgctgtgtgtttttttatgaattaaatacgtattttttaaaatggaacatattaattttctagctttcgcgatgcctgctttttttctctttctttttttagaatacaagcttgcacaacgacgaaagagaccggaaatttttaactatgaaagttcagtttcaaatattagcattggcattgcagaacggttgatcaatttgtttgtggcggccagtttttaccagttgtattatttgatttatgataattatcgattttttgacatttcgaatagtgttttggtgtggattgccttaattcttgccaccgattttgtctggtattggtaccaccgattggggcatgaagtcaattttttctgggcagcacacatcgtacatcatcatagcgaagagtttaattttactgcggctgccagaattacgacttttcaggccgtgattagaacaggattttggtgtgtactgccgcttattggttttcacccttctatggtgattaccatgctgattgtacacggagcttattctttttttacgcatacacagcttgttggcagaataaaatggctggagtatgtttttgttacgccttctgtacacggtgtgcatcacgcctctgatgagaaatatctcgataaaaattacggcgatatgtttaccttttgggatcgtcttttcggaacttttcaggaagaggaagaaaaaccaaaatacggtttaacacatccactcaaaacgtatagtttcttgtggcagcattttcattactattttgagatttacgagctgtggaagcgctcaacaggatttaaagcaaaatggaaagcggtatttggcagtcctgcccatatggatcaggatattcgaccaaccctagagaaacgttttctacaggacaaagcgaatccgcatcaaaggcttcgatttaagaattatctctatatccagcttgggctttctacgctgcttttaacggtttttacgtattgttttgaaggactaaatgtctcggacaaaatttttgtactgttacttattttggtaacattagtaaattgtggggcattattagaacaaagaagatggatttattatctggaatacttgagaatttttatggtaaccacttattttttatacgaagaaaatttgctttcctttttcttcatcccgcttgcgattatgatttttgctgaacaattattctcacttagtaaacattatcaggaagttgtactgcaattggaaacttctgaatagtataactaatcgccacgaatgcacgaatttgtatttcaaataattcgtgcattcgtggcgaaaaaacatagaagtttgttatttgtagcaaacttataaccttgaaaccttttggaattttaatttttcagtgcctcgcgattatgattttgccgagcaattattctcacttagtaaacattatcaggaagttgtactgcaattgaaaacttctgaatagtataactaatcgccacgaatgcacgaatttgtatttcaaataattcgtgcattcgtggcgaaagagctatattgaatttagataaaaaggtgcattaataaataatggaatgaggaatattcggtttatatttcccttgttctccaaaatgctctcatgaaaagctgtgcaaatgtcaccccgctcttcgaaaagtccttataaacaaaaaatcgcaatgatctaagtttagattattgcgatttttttgtggagtcgccgggaatcgaaaactaaaacgtgtgttttttaaattttaagtaattgaatttattgactttacaaacaaattaaaatgcattaatactaggttttgttcacttttttgttcactgtttttattgtattagtgttgagctatcctttgttgaatggggcttttacttcgcctgtttccagagcagattcataatctatatatactggatatagtccgtatcctttaaaaagtaagtaagttttatagccacgtttgttgtttcccaccgtttttattttgctaataactacttttgaatttgctattacggtacctgcggcaatatttgcttgtgagataaaggtaaattgatttcctgctctagggtatccaatttgtaatgtatctccggttttcacaatattattggatttggtttggtatgatatgaaatcggcttcagaagttattttgttgtaaactgcagtttgtgcgctgcaaattgaaacaaataataataataataataataatatcagttttttcattatagataaatttagtttctcaaatataattattttctttcattttcgaaaaaattatcaaaatccacattgttgtctcgtaacagtccttgaagccttactatctctttgattagtttgttttctttttctaaacattcagcatattttattaaatcattggctttgtaatttactgttggttcgggtttttctttagtgttttctttatcgcttccgatattttttttctctaacaattcaagaattatgtccaatgttttttcatgtggattttttgaagttccattgataattttttcaattcctgatatgcttaagttggtttttttgccaatatcgtaagaagttaactctaattctcctactttttttaaaataaactctagtttttgtttcttagttaatccgtacattttcaggtggttatgttttttgttttggttatttttaaaaagttatatacaaaaaatacaactaaatgtaaattgtgatataaaagtgttatatttgtgatatgattcttcacagaatatatgaacaaatatacaaaagttatgccaaatacaaacactttagaaattaatgtaagagatcgaaagactcttaacaggattaagactgttcagtcttcttcaaatattttgcgtgatttttttgataaaggctttaaaacttttgatgctttgaagtctatagttatgcattattatcctgaaatgccggaattgaaattgtatgatttttggcatttcagaagagtggatagtgaaatgtgtgaggctttagaaaatgtttttgaaaaattaaaatcggaataaaatggaaacggtgacaattccaatacaagaattaaatgtcttgcgggagacgttaacaatggcatttgaaatactaaatcgccatggtgtaaccgggaacttgattgttcccggtccatcaccaaaagaaacgaaaaagcaacgtgatgcaaggtattcgaaaatgattgagtccggatctcgtggtaagaaacctgattatttaaaaaagagaaatggatagattttctaatactgaacaagttgaattaaatgagatcaatgtaaatgatcccgaagttgtggaaactcttttatgcgcgcaagtaaatcgtgtgtgtagtccagaatcttttttcgaaatgatagaaacctgtaaaatatgtggaaaatgtgtataagtaattctatgcttgatttgataatcattgttttgttgatcgtttgtgcggttgcgttttggttcttgtttgttgcttataaagagtatcgcgctgatagggcttatttttttaaacttaaaaaaagatggaaataattaaagcttttggctggctaattctaggttgttttggcttcgctgtcttatttgttctcgggtggcttgtgatttcaatgtcgatttgtttttacaaaatctacatcaaaaaatcaaagccaaaatcaaaggaattagataattaccttaactaaatataaattatggaaacattacaaatcaacaaaaaagatgcgattaaagcgcatgatgaagctaccgcaaaagggaaatcgcttcttgaaaacttgctgggaaaagctgttttcttaaaatcaatcaaagaaagaatcaagtcgtttgatgatgttctttcagaactgaatattgtgaaatctgatttttatttatcgtgtcatggattggaatctgatgaagttgcttacagaaaagcaaaacttgtggcgaaattattcaatgagggctggattcctgattggaccaatgaagatgagtataagtattttgcctatttcaaaatgggttctccttcgggtgtcgggttttcgtactacttctacgttagctgggatacgcgttcgattgtcggctcccgccttgcatttaaatcaagtgatttggctgagtatgccggaaagcttttcgagcaggaaatttacaaaccattaatgataactgaatctgcttaatatggaaacaattcagataaataaaacggatgctgtaagagcacatggccaggctacgcctaaacagaaaacaatgcttgaaaacctatttggtaaaaaagtgtttgtaaaaaatatcagagaaagaatccaaacgattcaggatgtttttgaattgaacgatactactgaagcagatttttatcgtaagtgggatggattcgcagatcatgagatcgggcaggctttagaggttcttattgttgcggcatataatgaaggtagatttcctgattggaccaatgaagatgagtataagtattttgcttatttcaaaatgggttctccttcgggtgtcgggttttcgtacgacggctacgatggctggaatacgcattcgactgtcggctcccgccttgtatttgtcggtcctgatgcaaaactgaatctgttggatgcagtaaagaaatttttaccagagtaccaaaaatcaagaactaaataaaaccaattatcatgaaaaaaaatgcatcaatcgaagaaatcttcgaaagtgaaaatttagacgtcaatgcaatagttgtaacgggaattcctgagagacatgttgaagctatcaaggcaatcgcaaaattgatggttgcaactgattatcataatcctaatttcaagcctgattttacaaattatgatcagtataaatattctcctattgccgaaatgggttctccttcgggtgtcgggttttcgtacgactactgcgatgactggcattcgctttcgtttgtcggctcccgccttgtttctgaatcaagagaagtcgcaaaacgagtttttgacaatcatgaagatctttataaagcattcatggtttatgaaagggaagtgaaataaaataacaggttgtgcagtgagttgctgacagttctccttcaggtgtcgggttttcgtacaacaactacgataactggaatacgaattcgaatgtcagctcccaccgagcaaagaagatatttaatcattgcaaaccttgccagcatggcaaaaaatcacacaattaaaagggcgttggtacttatgggaaaacgacctgtttaagcaaggcatgaaaagagtaagtaatttatacgaaaagataataagcttagaaaatcttagaaaagctgatgaagttgctcaaaaaggtaaacagaagcaatatggggttgtgttgcataatcagaataaagaagctgatattttgaagcttcatgaaatgctgaaaagcaaaacctataaaacttctgaataccaagttttcaaagtgtttgagccaaaagaaagggatgtttacaagcttccatattttcctgacagaataatgcatcatgcaataatgatacatcttgagaaactgtttgtgtcggtttttacgactgatacttacagctgcataaagggaaaaggaatacatgctgcatctgataaattgaagctcactttgaaagatgttccaggtactaagtactgtttgaaactggatatcaaaaagttctatccaaatattgatcatgatgttttaaaaatgcttctgagaagaaaaattaaagatcaggatcttctttggttgctggatgaaattattgacagtgccgatggtttaccgataggtaactatttaagtcagtatttcgctaactactttttgaccggatttgatcactggataaaagagaataaaaaagttaagtactatttccgatatgcagatgatattgtgattctgtcgggtaataaaaagtatctgcattctcttttaggagaaattaaagtgtatttgagcgaaaaattaaagcttgatgtcaagcaaaactaccaggtgtttcctgttagtgagagagggatcgattttttaggttataggttttatcatgagtatgtcttgcttcgaaagtcaattaagaaacgatttgcaaaagcagtgtcaaaaaataaggataggagtgttttggcagcctattggggttgggcaaaacattgcaattcaaaacacctaattaaaaaattaataccagatgaaaagttttaaagatttcgaaataactccggtaatagaaaattttgtcggtgaaaaaataaatacagctaagattttagataaggagatagtcgtaaaaggttataaaattcaaccgtcaaaatttgaaaatcgtggcgaccgtcttgatattcagattgaatttaaagacgaagatagggttgtttttacaagtggtaaatatttgatccaaacaattgaaaaagttcctaaagacggatttccttttaaaactaaaattattaaaaacggcgaacatttagagtttgcgtaaataaattaagactatggaaaaaaagattttacaaaacgaaagtccggctgatcggttggagcagttaaaaagtgttgctgataagctggaggatttttcgtatccgcgtgaattaacggtcggggaaattcaggaactgcaatcaggtttgtcgcaggatatgataactgttgatagggctgaacaggagttgaaaattgctaaagaggtttttaagtctgaagtaaaaccaatcaagcagcaaattgctaagaacctacaaatgattcgtacacaagttgaggaagtaaaagagaaagtgtttttgttgaaagatttgaatgaggaaaaaatggggtactactcgaaagatggaatccttgtttttgaaagagagcttcgtccggatgaaaaacaatatagtataaccgatcacttaagaaaagcagaataatcatgaaaaatgaagataaaactagcccaattagtggtgctgaaattttagtaaaaaacacattgaaagatttgggagttcgtgaaatcacaattttagaaggtaaggctgagcctgtatatcacgataaagcaattgaagtaaaatcagcttctataaattctgcacttgaatacctgtctaaaaaggttgtgaagcctgagattatcgaacattcaaagcttgaattttgttacgataaattgtatatcaatttgttttatgatagtagacaaagaaatcctgatgttattgaagggtctttgaagctgcatcctgatttagaaaaattcaggattaatagcggtaaaacctacagcacttttgaattgtctgattttataaaaatgaatcgtcactacttcgagaataaagattatgctatgaagttggttgctgagcttagaaactttgaaggtaaagtaaatcgtgatttagaagcgaaaacagatgatcgtggtaataaacgggctttgataaatcaggttgttgaatcaaatattccaactggatttttcttagaattaccggtttttgttggtcaggaaaaaaagaggcttgaagttgaagtgaatattactgctgattttagttgttcgttgatttctcctgatttaaaggagtttattgatatagaatctaaaacggttttggatgatcaactgaataaaattaaagcgttgcatcccgaattgaaagtttttgaatattaaatcttaattatgagaacaatcactttcgatattgaaaaagctaatgcagttgagcatgcagtttgtgaagtttttgattgtcgtgtatctgaaatagtaagtttgaaagatacactggtaaagaaggtggttgtttttattttattggagtattgtggatatgacaaacgggttagtgggtattattatcaaatgtcttatctgtacgtaccaactgttgtcgctgaaatggagtatttaattaggactgttccggcttttgaaactaaaattaaaaatgtttatgagaaaattttggactgctgaagaaactgaaattatgattcaaaactatcctgataaaccaacagttgatatgataaagttattgcctggaaggactgtttctggtattactggtcaggcttcaaaattaggattgcataaaagtgaagcttttatgaaaagtccgatgtcaggaaggatttctaaggaaaatgatataggctttgatactcgttttccggcaaataaaccaggctggaataagggattaaagcaaaaggattatatgtcacctgaaaagatagaaaacaccaaaaaaacaagatttaaaacgggtcaggatccgcataatacgcagcctgttggttatgaaagactttcgaaagatggatacattgaaataaaagtaaggcatctaaaaaacggcgattcaaacaataaaaactttgaatttaagcataggataatttatgaaaagaattacggtctgatacctgaagggatgattgttgaatttttggatggaaataatcgaaattttgatccggataatttgatacttcgaacccgaaaggaaaatttgcttcaaaatacaatgtgcgattcttcgattgttaagcggtttttagggattaaagagcttgaagaagtggagaaaattattaatgaaatgccaaagctgattgagttaaaaagaaatttattaattaaaaaacaaaaattaaatggacataattgaaaaattaaccgaattgctgactgggaaaactttttctcataacggcaaagaatattgttttcaaagctgtaaaaaagtggtttcgaatattatgattttaactaacaaagaaacaattcaggtcccgatggatagattttcggatttctatgaaaaagtagaaaataattgctttgatgtgaatgctattgctaataaacaaagttttgttccttctgaattacctgttaagcagcctgctgtttttatacctgaaatgtctactacgtatcaaaaattaaatgcgtctttcgatagtttaattagtcaaatagataatgctacaactgaagatatttcatttttggaaacaaaggcaaagatgcttactactgtggctcaaactgccataggtatggaaaatagccgtgttaatttgattaagatatttcaaggtaaataagcagtttatggcaaagttaaccaaacaaatcattccgtatggaatggttccgaatacgttgttaaacgataatacaatatcgttaaaagcaaagggtttgtttgcctttatgcagtctaaacctgaaggctggaatttctccgtagataaaattgcttttcagtgtaaagaggcaaaatctagtatttctgaaggtttaaaagagttggaattattaggttatttagtaagaaaaaaacagcaaacgggtaacggtttcattgtggattatcacctttattttgatgctgataacggaaaaccaatgtctgatttccaatcattggaaatccaagtattagaaattccaatgttggaaaatccaactattggaaaatcggtaaataatagtaagaaatatataagcaagaaagataatagtaataaagaaaagagagaagaaacttcgctcgctttttttcaaaggaattcaccttctgaatgggaagtgtttcaaatgagatttagaaaagaatttgatttggctgaatgggaaaagtttcaggaattatttaattgtaaggctgatgaagaatcactggaatatacaaccaaaataattagtgccaggttaacaagatttgcaattaactatgttgagaatttgaaaaagccggttaaaaaattaattagcactgaagtagaaattaatcatccatcaagaaaaagaatatcgtaatgaatcaagattttaaaacttacaaagctgcatctgttcaaaaaacaaatgttatttccttacaaagaggaaagttacctcctcaagcgattgatttagaagaagctattcttggtgcattgatggttgacgtgcgtggtattgatgaattaatgcaagtgtttaataattctgatgttttttataaagattgtaataaagtgatttttgaagcaataaaagaactttcggagagatcacaaccaattgatttgctaactgtttcgagtcagttgaagaaaaaaaatagtttagatattgctggtggtgattactatttaatcggcttaactcaaaaaatagcttcttctgctcatatcgagcatcatgcaagaatagtgttgcagatgtacatgaaaaggaaagcaattgaggttgcttcatcgataattgaattggcttatgatcctgattcagatgtgtttcagttatttgattatatggatgttgagacttcgaaagtaaatgaaattattgagaaaggaagatctgaaatgacttatgctgaagctttaaatgcggctgttgatcgtgttaagatgttgactgatagtgatagctgtttaactggtgttgatacaggctttaaaaagttgaataagcattttggaggctggcaaccaacagattttattgttgttggtgcgcgtcctggaatgggtaaaacagcatttgtgactaatacaatgctgggtgctgcaaaggctggaaatgctgtgggttttatatctcttgaaatgagtactgaacagttagcgactagaactattgctaacgaaagtaattttcatttaaatcaattgacaaaaacaggatttgaaaaacctgagtattttaatggtttgttgaaaaaggttaatgagttaagaggtttgccaatttttattgatgatcgtccatcgttaacaattggtgaaattaaaagaaaagcccgtttatataagcgtaagtatgatatcaaagtgcttatagttgattacatacaattagctggtagtgatggtaatgaagatattagaataagagtaggtaagatatcgaacggtttaaaatcgatagctaaagagttgagtataacagtaattggattagcgcaattgtctcgtgaagttgaaaagactgcttataaaagacctgcattgcatcacctaaaagaaagtggtgatattgaacaggatgcagatgctgtttgctttatatatcgttctgcttactacggattagaagttgatcatgaagtaattgatgatgattgtaatacagagtttatcgttgctaagtatcgtcatggtggtgttggtacaataggattatattatgatgaaaataaaacaaagtttactgataatgaagttgttaatgaagcttctaaggtgactgattcatacagtaatgcggtagctgatattcctagagctatgccggctgatgctttttactctatcgaagatgtaagtactaacaatgatgattctaaaacaccattctaatcatggcaaacaaaccaaggaaagtagtaagaagttgggtaaagcctagagttgcattcgatcgtaaggttagctatcaaagcttttataacgctcgtaagtggcgcaatacatctaaggcatatcgtgaagcgaatcctatttgtgagtgtgaagattgtaagcgtgaagatatcgtaaagaaagctgaagtatgtgatcacgtgaagggtttaggttatctgctcgataatggtattgatccgtacgattggaatgagcttcaaagcatgagtcacgaatgtcataataagaaatccggaagtgaatcgcatcgatcacagaggggtatggggtaaaatctcgcgagctcgcacactgcgtacatcgctgtttagtcaagattttactcggagttaaaaaagagagggggggtcaaaatttaatatagttaagttatggaaaatctaggggttgtatcaattggaaaagggaaagacactttaatacaagtgcctacaccacctaaatatttaaccgattcggctaaaaaacattacaaacttatgggaaatgttttagcaaaaaacgatagaataaaagaaacctatttaaacgcattagaggtttatgcggaagctatggcgcaatttcaatttgctcttgagcgtataaaagaaaaaaataagaaagaattcggaacgggttatattcagactttcaaatcaggggctagtaatatttccgttgaacttactttaaagaatgatgcagttgacactttgatgaagtgttttaaacttttcgggttagatccaaaatccgataaagaattgaagtcaacagttgatccggcgcaaggtgatttgtttgacgcttttttgaatgcaaatcatagctaattaaaattggaatcatgaaagggaattcaggttcaaatgtcgatcagaaaacaaaagataaaattgttcacgaatggaaaacgcgaagacttaattcaataccaataatagccaaagaattcgaattgtctcaatacataataaacaaaattgtaaataactatttatcaactaaatcaacagaattatgaaaacaaaatttgtaaaagtaactgacagaaaaggtacagacataattgaaggtgaagttaaatcaggtaatgtattttctattttacgttttatatgccaagttcaggagcaggaaactgaaaaagaaacgcaagaagtcgctgatatgataatcgaagctttgactaaacacaaaaaagattaacatgataaagtcacacaataaagtgtcacaatacacgggcgtaggttggtacaaagaaacacaaaaatggcgttccagtgttacagaaaagaacattagatacgagtgtggttatcatgataccgaccgtgaagcagcaaaggcacgtgatctaaaaatccttgctttaggattaaagaaacctttgcaaattttaaaaccagcggcatgattttaactagaccaggaaataaaagaaggattataaaaaaattggcaaagcattttcccagtcacaaaatgcgaatagaattattttttggtgctggcggttcgttcttttatttaccaaagcctagatattcaatactgaatgattacgatgatgatgtttctaatttgtacttggtaattcaaaaacaaaaagaagatctgcgccaccaaattgaaattttacctatatcagaatcattggtaaattattggaaaaaaaacacagaaactgatcctgttttaaaggctgttcgttttttactgttatcaaactttacatatttaggaaaaggagatacgcttcgactcggtttagataatgctaaagagagtattctaaaaaatttagatgcaacgtttgaatatttaaagcattgtaaaatagtaagtcgtgattttaggaaagtgctttcaatgatttctttttccaaaaagctaaatgataaaaagcattgttttgtttatctcgatccaatttattttgagactgaatatttttataaagttccaaattggagttttaaagatactattgattgtttggatttgatgattacttgtggtataaaatgtgcaatgtccgaatttaatcatccaatggttatcgctgaagctaaaataagaggtctcaatattataactattggcgaaagaaaaaatattaaaaatagaaagatagaaatattaatcactaactattcaaatgatcagatttcgcttgaactaaattaaaaactatgaactggaaagaactaaaagatttctgcaacaatttgccggaatcagaattagaaaaaaaagtaatcctttggcgtgaagatgaagcggtagtagatatttacgcacaggggttagaagaagatcactacattaatgtggacgataaagatagcggatgtttttctgtctctgaagctaaatttttagacaaagatattcgtattaaaaaagtttacgatagaggtcacccgattttacatgaaaatttctaaaatttaacctatggcactaaaatcagacaacccaacaaacgcaaagataaaccaaaactttatcatccgagttttagaaaaccctaaggaaaatcatgttaaaaatacaaaattgacatcggcaaataagctttcgggttacttaaaagacgaacagcttaaaataaagctttttaagaagatattagatggtcaaaaagacaaatacacgtttctaataagaagtaggcttaaaattgaaattcagtcaaaataactaaaaaaagtagaaatcatggtagatcctaaagaatggggggaatttagaaattcaggtttgttattaattataaatcagcttttacatgtgtttggttgggcaatagttttcgaatttgaaaatgatcaagtaattaaagtttatcctgcacgggtaaaatttagaggctttgataataaaagcacttctgaagcttatgtaaaagtaactaactatttgaaagaaaatattaatcaattagacgaggaagtaaaactttaagttcgaaataattcactaacatcaacctttaaaaccttgcaaattttgaaaagcataccaattgaagtattgatttcgcctctctcaatccggcctatttgacttggttgaagatcacagtcgatggcaagtaatttttgagaaatttttctagataatcttttctctctaagttttttgccaacgttcttaatgaatattttttcgctattatctatcacgcaataaaattgcggtaaactttcaaaagataggagcgcatatttgcgcttttttaaactatttaatgcaattttaataatcaaaaacagaataatctaaaatgcaaatcacaccacaaatgcaagattctattccttttcaatacgcaaatgatgtgcgtactgggaagattatgaccggaaaaaggataaagcaggctgttgagcgtttttacaaatggattgaaaccgctgatcaagatggtttttatattgatcataataaaggaatgcgtgttattaatttctttccaacgtttctgaatcatacaaagggaaagatggcaggaaaaccttttgttttagctccgtttcagcaattcacaatgtataatgtttttggttggattaataaaaataatggatatcgccgtataaatactgtttatgacaaacgggctaaaaaaaacggtaaaacggcagaaatggctggattagcactgtactgtatgagttttgacttagaaatggaagctgaaatctatgttgcagcaacgaaagaagatcaggctcgtttgtgttggaaacaggctaaaatgtatattgaaagtccggtttcaaatcctgcgttgggtaaaatgggttttttttgtcaacaaaaaataataggctttaaaaaaacaaactcaacatttatggctctgggtggtgattctaaaacacaggatggaattaactgtcatgtgggaattatagatgaatatcacgctcataaagatgatacggtaaaagaaaactgtgagtcatcaaccgtacagcgtacgcaggcgttaatttatcatatcacaactgctggatctaatgtacaatcagcttgtaaaaattatgaggattctgtaattgaagtgttggaaggtcgtaatgtggatgattctctttggataatgattcataatatagataaagaagatctagagacagaagaatcatggttgaatgaagatctttggataaaagcgaatccattactatttcagggattagcaatagatgctattcgtaaggaatttacaaaagcaattaatcaaccatctaaaagacgaaattttaaaaccaaaaacctaaatatatgggtcgatgaattgtcagaatggatttacaatgaggattggatgaaaaataaggttgatatcattccaattgaaaagtttcagaaatttggttctttcggaggtttagatctctcaaaaacaatcgatttaagtgcttatgtgttgatttctgagcctgacgaaaatgaagaccgttatttaaaatgctggttcttttgtccaaaagatacaattgtaaaacgctctaaagaagaccgtgtaccatatcaatattggtcggataatggctggttaatagcaacacctggtaatgttattgattataatgtaattcatgatgtgataaggaatacctatcaggatcacaaagtaaatcgactagagtttgacccgtataacgccacaaaattaactcaggacttagaggctgaaggatttaatgtgtctgaattctcgcaaggtattggtacgatttctgcgccaaccaaagaatttgaaaaattagtattatcaggcaaactaaaacatgatggaaatcctgttttagcttggatgcttgcgtcctgcgtaatttattatgatgctaatgataatatgaaagtacataaaggtcgttctggtgcaaatggtaggcgtgttgatggaataattgcaacaatcaacgcgataggcggttcaatgtcagaacctgaagaaaccaatgaaagtatttataaccgagacgatacaccattcgtttgctaacccataaattcaaataaacatgacaaaccaagtagaagagaatgcgttacgaatttatattgaaaaaattgaaaaggaaaatgagcttctgcgaaagtttgcttccgtaaaaggtttttatgatgaatattttgcagaactccccaaggtcagttctaacaaagaagcatttgataatgtaaacgaattgtattattccctacatggaaaatacaaatattcagattataacgcttttaaacgaattacaaattattataataataaatcaaaatgaaaatactcttaataatcattgttacatttttaatcacaatagtaacaagtgcacttttagaattaaatttttttagcaaaaatccagtaagatacattcttgttgtaatgttgattataattgaattgttaacaggattttattatattaaatcagaaatgaaatgaacataccaaacgaaaaactaaaatctgaaaatttagcgaaagctatttcgttattaccaaaacctaaaacatttcaacccgctactgttacagtagcagtaggattattaaaatatacttttgaaaaacaaaaagataaatggtattttgttttctaaaagttaaattacaaagttacataatgtaaccatttagagagcaccgttaaaatacttttacgctataaatacatagcgtaatgggttttaacggtgcttttcgtgaaatgtttgctccacaaaaaaggagcgctactacagatggttcttatttcgggaactatggtggctttttttcgttaggctcaggaagtgcttacccaatgaagccgaaaaccgcactaaaactttctgctttttacaacggtgtagatcagatttcaaatgatatagcaaaaattccttttgcaatttatcaaaaagacggtactaatcgtattgctcatcctgatcatcctgctaatatccttatctcaactactcctaattctttaatgacttcgtttgtttttcgtaaaacaatggcgatttcttatttaatacgtggaaatgccttagcgaaaataagttacaatgcgtcaggatatccggtttcaactgattttataaactgggatttggtacaagatattcgtattagaaaaggcgaattattgtatgatgttcgtggttttgataaacctttgcttgcttctgaagtacttcattttaaaaatttctctcataatggtattgtgggtgttggagtaattacttatgcagcgcagcaattaggtatggcgttggaggttcagcaatattcggctactaatttcgaaaacaaaggtgtccgtcagggtgtcatccaaactgataaaacaatcgaaaatggtaaggataaaattatagctggctggcgtaaagcaatgggtgaaaaatcgcctgatagaattgttgtcttagatgatgggtttaagtttcaaccgattaatataacacctcaggaagcgcaaataattgaacagcaaaagtttaatatcgaagatattgctcgttggttgaatattgcacttcataaaattaaatctttagagcaatctacaaataacaatatcgaacagcaatcgctggatcacaattcagatactattcagccacatattacaaatttcgaacaggaatatgcaaagaaactttgtacgcctacagagttgagagatggttatttcgtgcgtggaaacatggatgttttacttcgtactgatatgaaatcaaggtcagaagcttatgccagagctgttttgaccggctggagaagcagacaagaaataagagcgctggaagatttaaatgaagggcctgaaatattaggtgaatatttaactcctgtaaacacttttacggaatctcaaattgataaaaatttaaaggaaaatggaaaataacgactatatccaaagtattagtgaaactgccgagagaagaacttttgcttctgaaatgagaactattaagaaagaaaaacgtgccgattctgatccggatgaatcattagatattatcgaaggatatgcggctaagttcaattctattactgagattggttactactataaattcagagaaaaaattaaaaaaggagcgtttgatgatgttttaaatgatgatgtacgctgtcttttcaatcataatcctaattatgttttagctcgttgtgttgaaggaaagggaacgttgacactatctgttgataaggttggattgaaatattcttatgaaactcctgatcgccaatatgctcgtgatttgcaaaacgcaattgaaactggtgatattacgcaatcatcatttgcatttgaaatagaagaacaaacctggacggaaatagaaggtgaaattccgacacgtgaaataataaaattcaaacgtctttacgatgttgccccggttacgtatccggcttatgctgatactgaagttgcaaaaagaagtttagacgcctttaaggaaaaaattaaaaaacctgaaaacgaggaaactcgaacagacaacaataaagagctcaacgcttttgacgctcaaattattattaactctaatttatagtaagcaaatgaaaaagtctgctttatttttacaacaacgagctcaaaagattgaagctcagaaagcgcttcacgcagcagctgaaggtgaaaaaagaagtttaaacgaaaaagaaactttagattttcgagcgttgcaagccgagattgaaactctaacggggcaatataatgatgctttaaaatatgaagagaaccttcgttcagttgaaggaacggatgaggctgttattgttgaagataatgctcctgaggaaagaaaggcagtattttcaattcacagagcgattcgctcacaaatggttaatggtggtgttaaattagaaggtgctgaattagaaatgcacactagagcggtacaatctgcgcaagcttctaatattcctatgtcaggcgtagctattgaattgagagctatgcaaacagttactggtgattcaggaacaaaaggaggtgctttagttcctacggagcttaaatctcctattgatttcttacgtcctgagccgcttatgaaaaaaataggcgcaacttatcttacgggtttaacaggtaatttaagatttccaaaaaatgaaggtggtattgtagcttcatgggaaggcgaaacaactacaactcctgaaacggctaatgcctacggttacttagattctattccaaaaagattgtcagttactgttcccatttcgcttcaaaatttaatgcagtcaagcatagacttagaaatgtacactgtcaatgaaatgaagttggctattgaaaatgcacttgatgctgcttcggttaatggttcaggtacaggtcagccattaggtattttaaataattcaggtgtaaatactgtaactacaggtgcgaatggatctgcgcctacctgggatatggtagttgattctgagactgctgtttttgttgctaatgctagcgctgctaaaatgtcttatgttgtgaatcctcaaacaagaggtaaatttaaaaagactaaacatgatgcgggggatttaaattatataatgggtacagatggtgctgtaaatggttttccgtctgctacttcaaatcacgttccggcaaacttaacaaagggtacaggggtaaatctttcagcaatgttgtttggagattttagccaattaaatattcatcaatggaattttatggatatttctgtagacgaattttctcgtaaaaaagaaggtttaattgaggttactattaatgtttttgttgatgttttagttaagcagccaaaagcattttcagtagtgaaaggaattataactacttaatttataaaagatgagtaaagaaaatatcaatacaactgctaaaacggcagttgtattacaaggagagtacaatgcgaaacttgaagttttaaatgctttgcctgaaactgcaacggcagaagaaagattaacggctcagactgctcatgacgaagcaaaatctcttttagatacggaattggcaaaagaaattaagcctggtgataatactggaaaagataaagcaaaagcgccaaaagcagaaaaaccaaaacttgtaaaaggtaaatttttgctttctccaactggtcgtttcggcttggcttataatgcaggtgagtctgcggaattagaatcgaaacaagcagctgaactggatgaagctggttatttcaaaattgatagtaactcgtaaactgcgctacaaatggaaactaattcttattatcaaccaatagctacaacgtctattattacgcttgcaaaagctaaaaagcaaattaaagctgatgaaggtgttggttacgaagatgatttagtgttatcgtatatcgatgcggcacaaggatcggtttcgaactttataaacagatctattgctgagcgtagtttgataattgagtatgacaaatttgaatctaaaattacgtttgaacgtaattacgataatgattcgattacaaaagtagagtactacgcgcctggtgaaacgactttaactgaattgcctgctgatcagtacaagcttcaaaaatcaaccattttagattgttatgatattaagtttttgtcaacgcctcaaacagatgttaggactgatgctgtaattgtaacgattaaacaaggttttacggcggctacatgtccagctcctttgattcaggcgatgatgttaagattgtcagattttaacgaacgccgtgaagatcgtgagcagggaaataatccggcatctaacaatttagctagagcataccgtaaatactagattatggaaaagaagccttttatcggtgaaatgaaaaacaggatcaagttagtagaaaaagtaatcgaaagaactccgtctggagcggttacttcttctgatgttactgttgcagaatcttatgcacgcatgaatgatttgtcaggtgtagaagatgttgaaggtaaagtaaggcatttggtaaataggacttatacgattcgatataatccggttgtaaaacaaaaaggcacggctttgatattgattgatgaagaaaagaaatatgaaattattcatattgtcgaattaggtcataagcagcatttagaacttagagtaaaattgtatgaataggcctttgattgaaatacaaggatatccggaattattagcgaagcttaaactgctttcagatgataaggataaaaaaagggaagttcttgttattctacgacaggttgctgggtcaacgttaaaagctgctcagggtttagttccggtttctggaaaatcgcacaaggctcgtggtagattaatacagcctggtaatcttagaaaatcattaggtaatatcactgggaaaattgaaaaccctacaatttacgtaggtcctcgtgctaaaggttcaaatgacggttggtatggtcattttgtgcatgacggtcgcaatgtatattcaaaaggatataagcgaaaaagaataagaggtgcaaatatgtcggctgcaataaaacgcaccgttggtaatccttttttgaaaaaagcatatgaagctacaaacggtcaggttacagatgatgctgaaagaaaaataacatcatttattcaacgtcgaattgataaattaagtacaaatgtttgaaagtatatcaaaagagattttcgagttttttacgacgttgccagcttttacaaatgtaatgcagcgtgctgacataaattatatctatccgatcgtggcgcccttaaatacatcttttcctttcactacgtatgttttaggcgagcgtagtccagagacaaaagataaaagtcaaattgtagcgacaattgctttttggtatgacgtagaaaactatgacgcttgtgcaagttttacagatacaatgtctgatacagttgatgataagtatatttttctttcatcatcaattgagtataacgaagaaagcaacacgttttcgggtgtaataaattttaatgtaatataattttttaaaaatatacaaaatggcaaatgatatttacaacggtaagtttcttcgttttaagtttaatgataagaagctaattcatgcaacaaactgtaaacttacagtgtcttcaaaattagaagaaattgcaacaaaagatactgatggtacggtatcgattccttcgggatattcttttacgggtagtgctgaagcgttactttcaaaattaccatccggcgatacgacacatgtcactgcggatgctgttttagatctacaattagaaggtgaagaaattgatgtagagtttacaacagatgtaacaggggattttatttatgcaggaaaagcatttattaataactttgattttggagctgaagttaatgcttctgtaaaagttacaatttcatttacaggaaatggtaacttaactaaaactgtagttactgcaccatgagtaatattgtagaaattaagcttaacggaaaaactttcaagctgggttacggcatggaagtttttttacagttaggtgagctttgggggtttgatactttagagcaggtaaatgaacaatttcagattttgcagaatatgggtggtgcaaatggcacatcactgaagaatatgaaaattgtttctgaaattttggaagcaatgatttctggtagtcctgaaaatggtgaaagaattaaagctattgatattcgtcagcttcctttagttgaatttcaaaacgcaattgttgaattgacgaacggttttgttaaaaacatgccgcaacaagaacctgaagaaattagttttgaaaaaaagccgaagaccaggaagaggaaataaggcctttaacctgggatcaattagaacagttagcgcttggtgaattaggtttaaatgttgattactattataaacttacgcaacgacaatttgttaatacggtaaatggatatcgtcaaaaagaagatttattaagccgtgagcgctggcatattagccgaaaagtaatgtatgcttatatgtgtaaatacttaggtgaaaacggaaaagaaaccgatataattacttttccttgggaagtaaattcggttaagataatgactgaagaagagtttttaaaagtgcaaaatgatacggctgattgtgaagcttactttgctaattgggataaacgaagagctggtgttgcgtagtttttttttattttattttttggattttgggaaggaaaagctggtgtaactaccagctttttttatgccatattttaggattaaagttacataatgtaaccttttaatattacctctaaaactacttttaaaccttaaataaaacggttttgggattagcaacaatcaatataaagtttactgctgacctacgtggattttctacagaaatgcagaattctatgcgtagaattggtgcgtttggtcagcaaatgacagctttaggtaagaatatgtcgatgtatgttactggcccattgttagcagggggtgcagctgcaataaaattcgcttctgattatgaagaatctttaaataaagtcgatgttgcgtttggtgattcctcctcgcaagttaaggagtttgcgaaaacttctttagaaagttttggtattgcagaaggtacagctttagatttagctgctacttatggtgatatgggtacggctatggggctaacaacggataaagcggctaaaatgtctgtgtctttggttgggttagctggtgatttagcatcttttaaaaatataggaatcgaacaagcagacactgctttagcctcaatttttacgggtgaaactgaaagtttgaaaaagctggggattgttatgactgaggctaatctgcaatcttttgcattttctaaaggtataaaggttcaaataaaagatatggatcaagcatcgaaagtaaatcttcgatatgcttacgttatgagtgcttcaaaaaatgcagttggtgattttgaaagaactggtggaggtgcggcaaatcaaatgcgtatttttcaggaatctcttaaacaagttgcccagcaatttggatcgataatattgccggcttttactaaggcaatttcgtatgttaatggcttggtaaaatctttttctcagttgtcaatagaaacaaaaacgatgattgtgggtattgctggggttgttgcttctattggtccattgttgactgtttttggttcattgttaacttttgttccaaatctaattacaaagttcaatgcgttaaaagatgcttggttaggtttgcaagctgttttggttgctaacccatttacagctattgctgttggtttagcggctattgcttcactgttaataatttctacatctagattcggtgatttaacaaatgcaaaaagagaatttgcagatataagtcaaatagctgtcgatagtcttgttgatgaaaaaacagctttggaaaaaaacctaggaattgctaaaaacaaaaagttgagtgatgatactcgtaaaaaagctattcaggatttaaactctttgtctccacgttatttaggaaatattacacttgaaaatttatatacaaaacaaactacagatgcagtaaaaaaatacactgaagctattttgcaaaaagcaaaagttcaggcagctgaagaaaaattagttgaagttcaaaaaaagcttcttgagttgcaattgggtaatttaaatgccgttaaaccttctgtatggcagaatctaggtaatgcctttaacagtgcgggtaactcaatgttgtatgctggtttgactgcgaaaacagttgctaataatttaggcgtggaaacttctgaagcgcaaaagcttatcaatatgcttactttgtttattggtaaaaataaagaaactgcaacttctacggatgttgttgctgatgctttagctggtctaggtagcgcaactgaaaaaacttttaaagtgggtacggtagcgtattatgaaaatcaaatagaaggtcttaaaaaacttcaaaaagaaatccctactacgaacgctgcttggaaaacatacgagagacaaatcgatgcgattcaattaaaaatcgatgctttgcaaaataaaaacgtaaaattaaagcgtcctgaagttcctgaatttgataatgtagcaccgcctgaatttagcttagggaatttaaaagagcaattatcttactatgaagcacgtagagaaatgtttgcaactacttcggctcaatataaaatccttacggatcagataaataacactcaaataaaaatcaataagattgaaggttcagaggaactaaaaacggatttagaagatattaaaacacgtgcacaggacatggcagaagctattgctggtactgtttcgcctgttgttactgatgcttttaatgcgatgggtcaaagtatatctgaaagtttgtctgataccggaacggctttaggtaggtttgcgggggcgctcgtaaaaatggttgttgatttagcggctgttgtggcaaggcaaattgtagtaaatcaagctatggcaatgtctaacgctataactggtgcaacggcttcaggttcggcaacgggtccagctgcggtatttacaactcctgcatttatagcgacagcaattgccggagtaattgctgcttttgcggcaattcctaaatttgaaacaggaggtatttttggcggttcttctttctatggtgataaaattttagcacgggttaattcgggtgaaatggttgctaatgatggtcagcaaaaaagaatatggaatgctatgaatagtggttcttcgtcgagtagtacaataattccaagtcttaaaataaaaggttctgatttattgattgtttttgatcgtgcaaatgatcgtaaaagtcgtataggataatgagttattatatagatataatcgaccaggaacttgctgaaaactcatttataattgaggttgcatctaaatcaggaattgttctcgcgtggaatggaagtgatgcaaaagataagctttcggttgtaggatcaagtcttgaatttgacattgctcatatagagaatattgacgcaaagtttataagattctttacaggaaatgagattcgtttcaaagctgaattaagaaatcaaagtgatgattctttaatatggagcggttatttaatccctgatacatatgatgaaccatatacgaatgaagttgtttttgtaaaaatgactgccatgtgtggtttgggaaggttaaaaggtaagtacttgcctgatgattattaccgtgatgagaaaagtgttattgatatactttgtaaaattttaagcctaacaaatataggcttgaatgtttattttaatccggctattgaaaattcggtacaaaaggattatgatcttatttttttagacacatctgatttttatgttaatgataaaaaaactaagaaacaggatgcttatgcaattttagatcagttgatgcaagatatgttatgtgtttgttttcaagctgataatcgttggaatatcgaaggtataaataaaagacatattagaaagtacacagcaaaattgtatgatgtaaacggggttttaaaaacgcaaatagatggcttaaagcttttaaaaagaattacaatattagctgataagccgccagtaacaatgatcccgccatacaatttaattacagtatctcatgaaagagaaccgcaatcatttcctgcaacaatatcaaaagaaagcaacgaaggttggtctgttattgctggtgtagttggtgaaatttacgctactgattggaatgggaatgatgattattattgtcaggcttatgctccggattattttaattcagtaaaaaaagagtatgtaaatcctgagataggtgggatgtcagagatacagccttttgatgaaaataagtttatcaatttaaaaaataagatttacttattcaaagatcaaaaagtcactattaaagctgtttttacaataattaagtacgcaagggaaatgtctgatttgttgcctggtgcaaattttaatccattgttgtatcagtttcttttgaatgatacggtagtgttttcaaatagaggtgtatcggctgatgaaaatcaaaatttatcttttgatgatggtaaggcagaattatcgtttgaatggattgttcctgtagatgggttgttagatattaaaatttggcgtccatcggggccaatttatcaaactaatatagtgggttttgaaataactgaattaagtatttcgcctgttgcttttgctgaaacttcgatttttacagatgtgatttctgatgaatttacagttgataaagaaattgatttggtttatgctgatgatgatacggggtttagcagggcttttagattaggtaaaataaaagaagcaactgtattgtataatacgatattgattccggttttgtactcttttgttcaaaatggtaaattctattcggttgttaatcttaaaggtgcaaatctgataaaagacaatattaacacggttgtttatgatggcggtgtattggataatgttgaagtgttttacaattataattcttcggagcagatggtggttaaaactgactttgcaatttctactggtaatttttcggttaaagtttataaaaatgatgatgttttaggtagtagagattcgtggatgcaatggacagattcagtgtataaaatagaaactgatcgctatcagaaaactgtttgtaatgttattcgtagaatgtttaatgaggcttcggaaaaatttgatgtcgttgctttggatgctgttaaatttaatgatttgattttgtttcgttatgtatatgataagcagtttgttcctgttaattgttcctggaatcttgacgaaaataaaacaacacttacgcttgctagagcgatttatagagattctggggatactggtcctaatcctgaaaatatacctcctattgttaatgcgggtcctgatattgttttagaaggtaatcaagtttctgctgtattaaaagcgacggcttttgatgttgatggttttatagtttcgcaacaatgggtaaaaacatttgggggttttggcgatgtaataacattaccaagtcaattagaaacaacattggagaatttaactgaagatcaatataagtatcaaatcacagtaactgataatgatggagcaactgcttttgattcggtttctattgttagaaagaaaaattacaatgtttttcttgatgaaattttagctgaaggtggtgaaggttcaaatgtgcttcattatcagtataagtttcgtattgatccaaatattgatccgtcatttaatttactgttaaaaggtaattcaggtttgttgagctacaatgatggttcggctacttttaaaatatttaagaacggagttaaaatttttgaggataatctcgtttttggagttgcaattcaaattgctaatttctcaattggatacatttcaacagatgaaatagtgtttgatattatgcagattcagcctttttggcctgatattaatttcggtagttctgctgttagtataggtgaaattgaatttattacgggagttggaaacgttattggtttaccgttagttggtcagccagtaccgggaatttaatgattttattatgaaaaaaaatgtacagagaataggtgttggaaatagaatattcccatccgtagatgaaaatattggaatcaatgaacctggagtttttacgtttgatagtactacggtttcatgtgatagtattgttgatacgtttgattttgatatcgtggttgttccgccagttgaaaaaagagattattcaaataaggattattctgaaacagattacaagtaaaattatggcagatataacagaaactcaggtaagggaatatattgctacagaattagcaaatgaatcagatattccggcagtgcgtcaccgtgcagtggagaataagttaatggattttattgttcaggaattggctaaggttgcaaaatcgaaagttttgattttggattcgtttacaactgataggaattattcacttgcaacagagcttccggcgaattcgattattgataatgtgactgcgatgttagtgtgtaaaaatgctgttttaggttttgctcaaggggatgttgttacttctccgactccttatccgtatgatgcaggaagaacggcagctcaaggaataggtgttttgtataataattttagtaatagtactgtaaaaatcatggtaaatgatcagttgactataatggggccttataaatcggagccaaacgcaaccgctgatccgattctaatttcgggaagtgggaccgctaactggtctattaaattaattgtgggatataaacaactttaaaatggctattaaacatataaatattggagcggctccaaatgataaaaccggaactccagcacgtcaggcggggcaaatgataaatgataactttgattatttagatggtaagatatctaatgtaaataagattattacggcaggcacttatgctttggttggtcagaatttaactattcatgttggttgggtttgggaaataaacgggcaacagttttataatcctgctgaagttgtaattaattttccttattcggcaatcggaaagcagagatttgatcgtgtggtttttaacacttcaaatacatttacgaaaattgttggcgtggaaagtgtcagtaatccgatagttgagccagttccagttgataccttagattttggtttttctttagtgacggataactcggttggtgaagttattcctcctgaagatttatcacaaaaactagatcgtggcggctattcaggaactgcacaggatatagttagcttaattccgccacctttaacttttttgccaattgttttaaatgatttgagtactataattgtaatcaattggtcagatcatatttctaaacacggcacaaggcctgtttatattgatctttatgaattaataccttcgacctcaataaaaagtgatgtgaatgtgtattctgatgatggtggggttacttacaaatggaatgttggggctgaatctactcgtttttatgaagtgagaatatacgggtacaccacagcattatatccagagttacctgaagatacagattttacgattgtggctgatgactttatgtcggcaaatatgattgacattgctggtagaaatacaccaataggtggtaaaacatgggtgaaagatagtggtacgacatatggaaagttaggaatagttagtaattctttgaagttaacatctggaaatacatcagatgcgatttattgcgttgattgcggtgttagggaaaaagatgtgacattgaaaataatatcacctccaataactcctttgacatgtggatttttccccatttataaagattcagataattatttacttattgatacccaatatggtattgtgtgtagattggcaggtgtaagtcataattcttatatgggcactggggcatgggcatcaaatgatttgattagggtaattataaaaccgaatgaaataacattgattgtaaatggaacagaattttttaatgggacaaatacttatatccagcagttaacaggaagcaaagttggctttcagagttaccaagaagtgaatgttgcatttggggagttaaaggtaaaggctacaacaatggatttgtcaacattgacaggcttaaagtttgttgcaaatggagattccatcactgagggaacaggcgctgatctgccaattttaagtaatggttggtttgctcaattgtgtaatctgtatagtgcaatagatgtaaatcagggtgtttcatctaaaactcttcaaccagtatcatctacatacttgtcttacggattcaatgcttataatccgtcgacaattcctgtttttgattttacatatggtatatacatcatcgctttaggaattaatgattccgcaatacacgatccggcagagttcaatgatactcaattttatatatacttgaataatgcagtagaatcaattaaggcaaaaggatggccattaaatagaattgtcatttcagcacctacttttattaatcaaccaggactaaattcttacgttggtatgggcaatatcactactcctaacaatttggcaggagttcaattgtatagaaacagatgtttgcaagttgctaaagagaagcatactttgttttgggatttaagtgcgccagtgattaatctttccaatagagatagttacttgtcagataatgttcatcctaacatgacatatcatacattgataccttcttacataaattcattgatattgattcagaaaaaataatctcagatattcaaattaaaaaaaatgattttaaaatacattccagacggttccttgcttataggattatttatactttttgttttagattttgcttttggtgttacaaaagcaacattgacgaagactattagaacttcggaaggttttcgaaaaacatttacaaagttcattcagtatggtggatccattattataggaatggttttactgaatataagaagtgttagtgatagtaaattaggaaatcagtattcaggtgtatttggtgattttatgataggaattatgatctatatcgaagtcgtttctattcttgaaaatatggaggtaataggtaataataatgattttgttagatattttattagaccagttcgtcgattgataacctttcaaattaaaaatctgttctctgatacggggaatgtaataactaaataacgatgataacacaagaaagactaaaagagaaatacggtattccaaacaaaaccggaacgggttacttagtaacaatcgatttgccttatccaatgtttttgaattgggcaacttcaacatacgttcgtaaaataagttgtcataaactggtagctgataaactgaaagcaatatttcaagaaatacttgaagtttatggtattgatgaaatcaagcgtttgcaactggatgattttgggggttgctttaattaccgtttgatgcgtggaggaactgaactttcggttcactcatggggtttggcaattgatcttgaccctgatagaaatcttttgaaagaaacatctaaaacggcaagatttgcgagagctgaatataaaaaaatgatagacatattttataaacatggtttcgagagtttaggacgtgaaaaaaattacgattggatgcattttcaagtaaaagattaactgatgataaatttaccagttttagtacaaaatttaaaggcaattgtatttgtcttcgttactttgatagcgctttggttttacaaagattatcaatttcagaaagaagaaaacattcgacagtcagaaaatgtgagtcagttaagaaaatcggacagtttaagatttacaagtcaggtattgacgcataaagaaattgaagagtatctgaattatagtgatccggagttaaagaaaaaagtaaatgcggcaaatattaaaattagtagaattgaaagtttggtttcgcaaacactaaagtatcgcgatacaattaaaagggaaactgatgtttccagcttggtggacgctatcaaaagttcaattccaaaagagcagtcttggagtgatacaactaaatgtatgacggttactggagttgcttctttcgatggtcaaaagctaaaggttgtggttaatgatcggcaattcaataataaatcggatgctgtcgtatactgggagcgcaagcagtggagttttttaggggttaaaacccggtttttaggaaagaagcaattcacttccacagtatttgatgagtgcggcgaaagccggacaatgaaaattgagaaaaagaagtagttttttatttatttggtttggttgttagacaggcggttcagaaatgaatcgctttttttatgaagtaaacctcgcaaatctatagtgcttagaattaattagatagatgtaaatgttaaaatttagaaaatacttacgctttttgtgtaagtattgaaggaattgttgtatatttgtagagtagaattgaaacaattattaacaattaaattttaaagcaatgatttcattagaagaatgcgaaaatgctcttggcattgtaagtgcctaccttacgcaaattagatcggtagaagttatcgatcgaacagaagaaacgttcagagaattaaaagatgttcaaccaggtgattttttaaaatgtgtaaatgtacatggcgcaagtagtttcacaaaagacgaaaagtatgaagtactaagagtccaatggacacaggttgaaatagtgaacgataaaggagtaaagaagtggcaccgattttctaacaaacacttcaaattaatctaaatttattaattaagggaggttgaaagatctcccttaaaaaacaaaaatcagcatgaaaaaagcacataaaagaaaaagaaatatatttctaaattggttaatgtacagcttcttagttaagtttgttgaagaagagcttacctatcaaattcaattcgttgaaaataacaaaacggtaaatacccagcaaatgtacatagtgccccaaataggctcaaaagtagaaataattagagttgaatttgcagaagaaatcaccaagttgtttttagtagaggatgtgatttattcttcttttggatctgccaacaaagtaactggaagatttattggatagccaacaaacaaaaaaacctctccattatagagaggttttacgtttttgtagaacgaaacttaattattaaaattaaatttgctacaaatataatcaaatggaaacagaaatattaatttcgttaatagagaagtcagagctttctcaacgacagtttgctgcaaaggttaatgttccggaaactaggatttcggaatggttaaaaggtaaacgtaaccctaaaatgacttcattaataaattttgcaaaaatactaggttttgagatagttgtttcttttgagattaataaaatttaactactatgtatagcatagtagttgccgctgatttttaaattgtaacacataactctttttttttacactaaattacgaaaagttgcttataatcctttgcggcgttcgtaataacttttttcttcttctacaggtggagcttttaaatgcattacatttttatagtattttgtaactgcagcatctgtgagaacgattttatttcgatccaattcaatatccaacccaagcaaaatacaacctcttctaatatcaagtagtagtacatggtttagcattaaatccaattcgctatataagaataatttgtgaattgctttatatcctacactttttttccctagtccggaagctttcaatagatgtgcttctacctcattttttatattactattcatgatattcaaatttagacatgcaaaattagcgtatattataacaatcttgcttattatgtatgttctaaaatactctttactctttactctttactctttactctttactctttactctttactctttactctttactctttactcttaaacttcccactctccttttgcaacaaactgagctttccctcctattttgatatcaaattgattttcggtcaatttccctttaaaataaatttgagacggacgattgatataatctccctgataattgatcatttcaaattgcggtaaatgatattttaaaagaaaagcctgtaaacaagtacttgcgcttccggttgctgcatcttcaaccaattgattgtgctcaatacacaacattctgctaaacaattttgagtcttccagataataaaaatacaaggctctgtgagctgttttacagttgtttttcatccattcatctgctttatctttatctaaaaccaaattttccaatgctcttttattgctcagtccaaccatcacaaaagcacttccggtcgttacttcctgaattgggaattgattctcgaaatcttcttttttcagattactgaacagggtgaagtcttccttcgcataaatatcccaaaacttaggctgtgctgcttttaaccaaattagatcttcagactgatgaatcggaattgccccaataggaacttctaatgtgatattctctggggaattatcaaatattttaatgattaaaacccacgaagttccaattataggatgtcctgcaaactgcatttcatgagcaggggtaaatattctgatctctgctttatttttttctctgtcaagctttgttataaaggtgctttctgcaaaattaatctcgcgtgccatctcctgcatttcttcagtacttagattctccgcttccgtaaaaacggctaactgatttcctgtatattttttatcggcaaaaacatcaactatataaaatggtaaactcatctctttttcttttttttatttagatgatagaaccaagacacaagacttctattcttgcatctttactcttgcatctattctctataatcttttattcttgttttttttttaatagatgcaagaacaaagagaaaagacttctcagcaatctttcatcttgcttcttgcctcttttttctatcttctatcttctctactctttgttcttacttattaattgaagaattcgtttttgcttcctccaacttaatcgcactcaactccgttttagcctcttcaacaacatccggataatcggtaaaattgttaatgacgttgtctaaaatataagttgcctgataactgtcttttaatccgtaaaaattcttggccattagcactaaacttttcgctccgtaatatttgtaagccgaatagtttttagccagcttttgtactgaaacatttgaagcctcaaattttccttctttggttttaaaataagcatcataatacaaggcttccgctgctaattctcctttcgaagttgccgataatttagcataggccgttttggccttgtcttcgtttcctgtttgcattgccgcgcgtgccacgataatttgtgcatcggcctttacatttgcatcggcttttgcattttgcaatactttatcagcatacactacagaattgtcgtaatcttttttgtcgtaataacatttcatcagattggcctgtgcaaagtttttattctgaggaaaatcagcttcgttttctaaacgaactaaaaccggaatcgattgatcacaatcttttgctttaaggaaaatctgtgcgagtctgctcaacgattgctctgtaaattcacttcttggctgatcagtcacatactgataatttgccactgattttgtttccgacccttcggcaaaatacaattgtgctaaataaaagttagcttccagcgcatgcattcctttcggaaatttgctcacataacctgtaaaaccagttatagcttgcttactgttgttctgactatattgtttgaaagccgcatcgtaagtatcattatccaactcagcatcagtaaccgccacaaaatctaaggtacgtacccaggtcgcatattcatccacctttcctgagtcgacataaatcaatctggctgtcgaaacggcttctaaagcttcgggagttttaggaaactcggctgctacttttttaaacttcaccaaagcctgatcatcgcgatctgaattgtaataaatcaatccttgttttaaaatggctttcgaagtaaacgaaccatttttaaattctgaaatcaactgatcgtaggttttaagtgcctgatcgttctttttctctgttacataggtattccccaattcgtataaagcatcatcgcgataagacgactttttatacgtttgaagaaaatggctcaactcctcggcttttttatcatttttggacataaatccgtaagaaattgccttttgaaactgtgcataatcggcgtcaacaccttttgcttcaatagctttggagtacgcttcatttgctgcactgtacttcgaactcacaaatcggcaatcgcccaaacgcaaatacgaatcgtttaaacgtactttatcttctttcgaattgtcaatttgtgcctgaaaagaattccctgcctgatcgtattctttttgtttaaaataagcataaccaatattataattgatgtttttatactcattagtcgttttcgctgcagccaaccctgcaaattgcttgtagcttagtaaagcattctgaaaatcatcggtcatatattccgtttcggctttccaaaaagtcgcacgcgctgtaaattcaggagtcttttgttcgctgacagcatttttgaacattttccctgcttcgggataattagattcattgtacaattctacacctcggtaaaaaagtactttttgataagccgctttattctctgccgacctgtttttttctaataacgaaagtgcttctttgtagtttttagaagaaatataagaatcaaccaataatttttctacctcagatctgcttgaattatttggatatttctttaaaaaatcaagcaaaattcctggtaccgtttgataggcattcccaatttcatagctcagttttgcataatttaacgctgcgtcttcctgaatttgcgcattgaaatccatttcagaagcatttttaaacgcatttaaagcttcctgctttttatctgtatttaaatatgctaaacctaaatgataataggcattttgagctacaaaatcttttccttcaataattttattgaattgggaaattgctttttcgtactctttttgttcgtaatacgcatatcccaattgatagaaatcggtattattccactttccttttttaccggcatactgctctaaaaacggaatcgctttaccatattgctttaaattgaaatagctttctccgataattttgttcagttctgacttttccaaatcattcgatttactcatggctttttgccccaaatcgattgctttttggaaactccccagcttaaaattcatgtcggcctgataatacgaaagcttttctttgtacttttcttcgcctgaaacttcatcaaaatatttcgttgcttctttataatcatcaccttcatacgccataaatcccaagtaatatttggcctgagaaccaaaatcgggagaatttaccactttgttaaaataagtagttgcttcctttttctttttagcactgaaataactatatcctttttgaaaattaaatttatccgagtctgatttgctcatgtaactttcatctactttatcaaaccattgcaacgctttcgggtaatttccctgctcaaaaaaatactgagccacttcaatatacgcctgattttgttttgtacttgtcggataatcgtgtacaaatttctccatcagcgcatcggcatttactttatttgttcgaatggcgcaattggcgatataataagcacaatcggattggacttcctcagtggttgcattattttttacatattcgaaaataagttgggccgaagcatattgtttgtcattgtacaaggccagtgctttgtcaaaatcctttaagtcgtaagtataaatagctgatttttgtgccgaaactatggttgagaaaaggataattgggagtaaaaagaaccagggaagtttacgcattttaattatatttagtattcaaatgtatcattttataccgtttataacgaaacgttccttgactttattatgaataaatattttaatcgtaattattaaaccgtatagtaaacgccaaaagattggttctcaaactttacagaaatatttttctattttacaattaaaataacaattctgttatgtttgacacagatttcacccctcctcacagattgaaaaattaactttagcagaaggaataaaatcattctaattctttaatctgtggccgtttttttgaaattcctcacagaattgattaaaatttattttgaatccaagcgttatcttattacttttaccattcaaattaattttattatgtcgcaaaccgtactgtctcttaaagaagtcactatatatcaggaaggaaagaaaattttatctcacattaatttagatgttcagcatggtgaatttatctatataattggaaaaacaggttccggaaagagtagtttcatgaaaacactttatggtgatttacctttaactgagggtgaaggacatatcgttgaatttgatttggcgactttaaaagaaagcgaaatcccttatttaagacgtaaaattggaattgtgtttcaggattttaagttacttccggaccgttccgtaaaagacaatatgctttttgttttaaaagccaccggctggtctgaaaaagaagccatggagcataaaatcgatgaagttctggataaggtaggcatgaaagaattcgtaaacaaaatgccacatcaactttcaggcggtgagcaacagcgtgttgccattgcaagagcactgttaaacgatcctgaatttatcttagccgatgagccaaccggaaatcttgatccgcaaaccagctcagaggttcttgaagtacttaaaaaaatcaatgccaacggtaaaacagtgatcatggtaacccacgattatgctttactaatgaaattcccgtctaaaaccctaaaatgtgaagacgaaagaatttttgaagtggtgcaacgcagcgtgtaatgctctctattttaattccggtttttaattatgatgttttgccacttgttaaagaagttgcaaaacaatgtaatgctattggaattcattttgaagttctttgccaggacgacgattcaaattctcacgaaaatacgctaaatgcagaaatcaatcttttgcctaattgttccttttttaaaaatgaaactaatttaggaagaggcaaaaacatcaattcactggctcaaaaatccatatacaactggttgcttattttagactgtgatacctttcctgctcagaataattttataaaaaagtacatcgatgttatttctgattcgggaaataatattctgtttggcggaatcatttatgagaacaatgaacctccaaaggagcaatttcttcgctggttttatggtaataaaagagagactctttctcttctcacttcaaatctggtaattaaaaaagatatttttgttcggtttccttttgacgaatccatcaccagatacggttatgaagatttgtgtttcttttctgttttaaaagcaaatcattttaaaattcttcggatagtaaatccaacttttcatttgaatttagaaacttcaaaagtgtttttaaacaaaaccaaaatagctttagaaaatcttgtttttctttatgattcagataaaatactaaaaaaagagagtaaaattataacttcttttgaatctctgagaagactcaaattaacacaattttcggcttttctttttgtaaaaaatcaaatcagaatcgagcgaaatttgttgtcgcagaaaccttctttatttttgtttgacctgtataaattgggctatttttgtagcttaaaaaaaactaattagccactaaagtgtctagaaaaaatctccattgttccattattttatccagggcataattctcagatgtttgcttagcttcttcaccaaatttcaatcttacctcctcattttcaatcaaaaaagagagtttttcaacatatttttctatgttgtcatccggaattaaaaaaccatttttagcattggtaataatagatcccgggccaattggacaatcgtaagcaacgcaaggtaagcctaaagccattgcttccagcaaaaccattggaaacccttctgttcttgaggtcatagcaaaaacagaggctctacaatacccttcttcaatattttcaacaaaaggcatataattgatccccgattctatattcaattgtatggcttcttttttcaaagcatcaataccatctgtataaatatccagtacccaatccggatgtttttgaataatttctttccagattaataacaatcgatccaatcctttttcaaaagaatttcgaccaattgcaattacctttttatgctgtaaattagagactctattactttctatccatgaagggtttgagattacaacaccattttcaacattccattcttttaaactttcttcagataaagctactattttagtaaactttcgagcgctaaaatctttaaattgatattttattctccgaattgattgtgaagtcaaacctcttttcagatctttttcttcaataaatttagaaccatgacattcaaatacaattggtactttagttttggtaacaaaaggaaagataaatgcttttaaaccattatcagcaatcaaaataacatcaggtttaatttcgctaaccttttgatttatatgcttttgaaaagaattgaaaaacttaaaaatattgcctttcaaaattatattatgaaagacaatttcagtattaaaagtataaaaaggcgaaccagtctcttcattttgagataaaatatgaacttcataaccaaaatactccacaaaataattcgctttgatagccaaaactctggcaactccgcccggtttttttatttttgggacaatataaagtaacctcatttttttgaattcaaaaaaacatcaaaatctcgaatataatctgattcatcaaaaacgtcagaagccaaaaccaagcaaacagcgccggaagaaaagttttccagctcgcgccagacattattttcaatcaataatcctttatctggcttattaagaaatacttttttttctgaactaccatctttcaatataacagtaaaactacctgaaattgcaattataatttgtctcagctttttatgtgaatgacctccgcgtatggaggaagaaggtatatcatatagataataaactctctgaatttcaaacggaacaaatcctttttctaatacagcaatattccccaagctgttttctatctttggaatatcaataatttctacattcatcttaatacaatttaaccatttgaaatcatcaatttaatccatttttcacctattctttctaatgaaaaatcaagaatactttttaaactactttccttacattttttatacaaaacttcatctgatacaaataaatttagtgcttcagtaaattttatccaattttgattttcaactaaaataccgttttcaagattaataatcaaatctcttggtccaaaatcgcaatcaaaagaaatcactggtgttctacaggctaaagcttctaaaataacattcggaaatccttcatttttgctacttaaaactaaaaattttgccttacttacatacttaaaaggattattctgatatcccaaaagatgtacaaaatcaccaatattactctcgaaaattgctttttttaatttcgattcatctccatttccaacaattgccaaatgaattttcttttctcgtaaattcgattttgcataacttgaaatcagtttgtcaaattgttttacttcgttttcatattgcccaacagctataataaaatcaaaatcaaaatctatttcctcattttgtttttgaagaatctcgtctaaataaataagattcgggatcattacaacattttttaacttatgttttgtttgaatcaaaatcttcatttcatttgtaattgccacattcgcataacaatgattgtacatcaaccttgttaaccatgaattattaggcatataatggtcgatcaaagaactatgaacagtaaaaatggtcttggtattgtaaataagccttgctaaaataagttcttgcactactttagttcgaaagcgaaaatcgataataaaatcaaatttattttcttgcaaatactttcgtaaagccaataatcttttagctttattaaaaaatccattttttttattttttagcaatcctaaattaaccaatttaccagaatatggaaaagtaacttcatctaaaactataataacatcaacctcaaaaccttgtctttcaaaaaaaatagacaaatttgccatcactttatcgcttccgccacccgctaagcggtaaccaattaaagcgattttattttttttgttaggcactatcattatcgatttcttattttcgtatcaaatatataactctttaaaaacaatatgcaaaataaatcattggtaaccgttatttgcttatgttataatcatgaaaaattcgtgattgagagtttatgttccgttattagtcaggattatggtattgttgaattaataatagtagacgattgtagtacggataactccgaaaatataattaaagaatggcttgtaaattatcctcaggtaacattcattgtcaatgaaacgaatttaggaaatactaagtcttttaataaggcattaaaactagcacaaggcaattatattattgatctggctgccgatgacgttttattaccaaactgtgtttccttacaaataaagacttttaaagaaagtgcttataaaaatcttggaattgtttacggaaatgctgaattgattactgaaaaaggagaatttgactcttactacttccctgtagatgataaccgtaaaacaattataaaaaagcaaaccggagatatttatttaaacgtactttcgggtagagacagcatttgttccgtctcttcaatggcaaaaaaagcagtttatgattccttaaacggttatgatgaaaaactatcctatgaagatttagatttttggatcagagcatcacggatttatgaatttgattttattgatgaaattttgataaaaaagaggatttcagaaaattcattaacttcaagtttttacgacaataaaaaattaggatttaaaaaaataaacctatctacttatctgatcctaaaaaaagcgatccagctaaatcgaacaaaagaagaagatctcgccattcaaaaaagagtacatcatgaaattgtacatactttccaaatcagagattatggtttatttttaaaaaatatcggcctacgttttcgattattttggagagcttacttcaaaaagtattagtttttcttcaactttaaaagtactttccaagcttctttgggttcctctaatttcagtaaccaacaaataaacaaataagttatcgttccaagtatagcacctaagaataattgcactattagattatccacaaaggaggttatggcaaataccaaaattgccattccaactgttgcagcaaaaacaggcagcatatctttcaattgagctattaccccataaccatataacttccccgggagatatgcatttataacaaaagctattgctgatgtaacaacatgaccgattataatggcttttagccctaacggaattgtgattatcatagcaagcacagttaaaggtaatttcgacaaatcaacttttaagtacaaatctgatctgccaattgcatttaacaaactcatattaatcacactcataggaagaaaaacacgggaaaaaaccatccattgtaaaaacggaatcaggaaaatccatttttcggtaaataataatatgactataggttttgccagcaaagcaataagcgtcataagcgggataattaaaaaagctgacatacgaatcattcggctataaatagaaactaatttctctttatcatgctgaacaacggttaaaactggaaatgtagcctgctgtataatactcactattgttccccctgatagatcagcaaaactcttagcccttgtgtaataaccgagtgaagccgtgggataaaatctacctaaacaaatattataaacgttatttaataactgcgcatataatcctgaaatcagaatttttgatccgtaaccaaataaagagcgaaaagattttttcgaaaatgaaagtaatggactccaactgcttaaaaaccatagtgaaactgttgtcgttaaagaccatactaaactttgaacaaccaatgaccaaactccataaccctttattgctgatagtacaccgcataatccacccaagattacagacagcacattgctcttagcaatagatttaaaatccattgctattgttaatttacttttttgaactattgcaaaagcatttataaacaaacttaaacctaatactcgtactaaatctgttagttgtggctgattaaaaaaagttgaaatataaggtgcggaaaaaaacaataccagataaaaaaagctgctaacccataaattaaacacaaatacggtagaaaaatcaatttctgttctattttgtctttggattaaacatactcccaaaccgctttcaataaaggtctgtgacaaagccataaaaatggctaacattcctattaacccaaaatcttccggcagcaaaatgcgggcaagcactacgctcacaataaattgtccaatttgaacagcgaatttatcaatagcagaccaaaaaactccttttgttgctattgattttagagaagtgttatgcatttaagaaaggttaattttttacttctttacaatcgtacatctatcacttgccctgtataattagataataaagtctgaatgcatcttaaagcaacagtttctggttttaataaagtattttgtaattcacttccaaaattctttattcgcattggtgtctctgttcgttccggattcatacaatttactttaatacctaatgtttcccattcttgtgaaattgcctgcacaaaattaacaattgcagctttaccagaagaataaatactgtaaaacgccctacccctggtataggagcttgaagtaaaaaataaaatatgcccttttgattgttttagatatggtaaggaagctaatgcaatattaaccattccaagataattaacatttaccgaattcagaatattttgataattcatcgtctctaaaggttccttatataatatgcctgcggtattgacaatgtaatcaatcttatgctctgtttgaaatactttttctaatacctccttaacagcttccatattagagacatctacattattctcgctacgggaaaaattataaacacgtatcccgttctgctttcctaaatctacaatacttttcccaataccataagttcccccaaaaacaaccataactttatctgctagggattctaaggataattcaatattttgaatttcaacagagcgcagttgaaacaatttatctaacaaataagtgtcttccggataagtaagtttcatgttaacctcttcaccatctactacaaaaatactttcttcaggcaaatactttttaactaccccacagtcatcagtagctttaaaatttttatctttcatcgctaactcgtaggcttttgcgattactgcttgtttaaaaccttgtggagtttgtcctcgacgcatttttacacgctcagggatagctgttataatctgattttgaacctcaataattgtatctgccgagtgaatagcaacatcaacagccttgtaattatccatcgcccctacaacctcactgataattctttgacttactaaaggacgcgcagcatcatgaaagattagattggcatcttctaaatctgcataagcattcactgctgcaagactggaatggtatcgctccttaccaccaattagaacccgtttgactttcttccattcgtttttaataatcatatcctctatcataaataaataatgattattaataacaattgcaatttcatcaactaattcatttctttcaaatgcatctacagtatgttctataaccatttttccggcaactttaaaaaattgcttaggcaaagatttttccagcctaattcctgttccaccagctaaaataacagctatattcatctattcttttatttttataaaatttagttatttcaaaaaaatcattcaaaaatttgagtttctaaataattcattatgttttgtgatgcacttaagttattgttctgaattagattattttcaacaaaattattacgcgcttctttcatccaatcattttcattcaacaacacattttcaataaaatcaatcaattcttttttatttctggactgataatgcactgccacagttttttctccaaattcgctccattctctcatgaccgactcgtttcttaccataaaaagagatggtttctctgtaataagatattcggccataaaggagccgcaatcatgaatcaaagcatctgacgttaaaaacagatcagtatattcagaattttcaaattggccattctctaaatccatccatttattgtaataggcatctgttttatttttaccccaattcggatcattttctagtttaattcttagtagcgggtgaggtttaaaagcaatttgcaattgattcttatacacaatagccagttccaaaaaaacatcacaatactctaaaaaatttgatactttattaagttcattcatcgaatgatgtggagcccatattactctttttaaagtttcatcattatttttccacacattactattaggtttcttgcttgttaaaagctgatcaaatcccggataacctgttacaacattgttctttcctttatttttttgtttctgaaatgcaatattcttatggataggggtttctgaaaaaatcctccaaacaagattatgaaagtttaaattgtaaaaagcatcatagttcgtcgtcattatagcataaggaacataacaggttaaagtattcgaaaactcctttatatagtatctataatctactaaaccttcgtaaggattagtgtaaaaaacgatatcaggtgagaacgactttttgatatctaaatattctcctttaatattatcaaaagttttaacaacatcatatcctctacttttaaaggcattataggctttatccatttcaaaaagcatattttccttaccaaaatttacaacaggacaaacaaatatttggggctcaaaccgagaatgcgcgagcattaaatcgaataacacatcatatttccaaaccgattcatgaattagaaaaaaagcaacttttaccttttcttttttcctgacaacttcgagtgctttttcatgatttctaggtgcctttttgattaaatatgattcataggcggttcttagatttgtaaaattataaaacttaatgagtaatatccatattctctcaggaacgaatttcttaatagttaattttacagtcattttcctttcaattaaatttaatatctatttaaaacctcaacaataaaatcaacctcagcatctgtcaaaacaggactaattggtaaactcaaaacttcctgatgaatcttttctgtaacaggtaatgacaaattactccattccaaaagtgccttttgctgatgtggtggaattggataatggattatggtctgtatgttattttgggataagtagacctgcagcccttcacgatctgaagttcgtatcacaaacaaatgaaaaacatggttatttgaaaaatcccaaaacggaagtactattttttcattttttatttctgccaaatatcgttcagctattttgcgtcgtctctcattatcggcatctaaatgaggtaatttcaaacttaaaaaagcggcctgaagttcatctaatctcgaatttactccaatataatcattgtaatatttcacctcagatccataattacgaagcgaaaaaagcactttagccaactctgtatcatttgtcgtaatggcaccaccatcgcctaaagcaccaaggttctttccgggataaaaactgtaagctgatgcgaaggataaattattaattgttgattgttgatttttaattgcaccatgcgattgggctgcatcttcaactattaataaattattccgatttgcaatttcatttatttggtccatttcagccaattgtccgtaaagatgaacggctaagatggctttggttttcggactgattttttcctcgattaaatcgggattgatattgtacgtttctaatcttggttccactaaaatgggaaccaaatctgcctgcaatacagccaaaatactagcaatataagtattggcaggaactattacttcatctcctttttgcagttttcctaaagctatatatcccttaaaaatcaacgttaatgcatctaaaccgtttcctgttccgatacagtaatctgttttacaatattttgcaaaagcagtttcaaatgtttccacttctttccctaaaatgtaccagccactctctaaaactgttttcagtttttcctgaaatgcggtttcataaggtttgtttattttcttcaggtccagaaatgatatcattttctttttttctatttaaacaaaaataccatttaacttcttataatttgcagtttccaattcgtagaaatcatgaactatggtgcctgctccaaaactttctttccagtaagacaaaccttcattcaggttctttccctgattttcattcgaaattccaaaatcaaaaaatcgcttttggacaaaccgctcctgaatcagataatgatacaaataatctaagctgcctaaatctcccatttcattcttcgaaatatactgacaatgcaccgttgtttccgtttcaaaaattgtagtgccggctaccattttatcttctaaatacacattaaactggtgaatgttttgaggaaaatgcttctgcagataagacatttcttctgctgaatgtaccggatttgctttgtgttttttattcaaattgggaattaaaacttcattccaaaacaaaccaaaatcagtttcttctttgatcatcaattgattcgaaactcctttttgaaaacctctttttctaatctttgatacgacactttcctgagacaaatcaattaccgaaagtgaatcgcgacgtaccagtttcgcatcagccaaaaacagcgcatacaaaatttcttctgcaggttttagatggtaaatagaaggaagagttttataatgcagtttcagaatctcattttcactcaaaaagaacaaaaccgtctgaaaaatttcaataacgtcaacttgttttgttttttcgctatacaccaaacctccgtaggtcaatccctgatgggagtaaactgaattttcgactttgttcgccggtaaaattgcttttaacttatcattctcaaaaaccaaaagggagaaatcttcaaaccggtcttcgtggtattccataaaatcacggtgaaacagaaatgtagcatttttagcctgcgccacaaatgcattccatatttcgtaatcgtttttatgataattccttacggtatatttcattccgctttctgtggtaattttatggttctctttttgagttctgttgaaacaaacttataaaaaagtttgccacgaattcacgaattttatttttattgtctaccaaaaatttaaattctgtttgtgaattcgcggctcttaaattttcagcacactgctatcgttcaaaaatcttacttgtgttcaaatgccggtaaataccatttgtactttacggctaataaacgtgtaacaatcattacgacagaagtcactaaatacaatatatcgtcttctaaattcagttttttaaggataaaaaatacgattcctccaaaaatacagatggtggcataaatctctcttctaaaaatggttgggatttcgttacacaaaatgtcccgaatcacaccgccaaaacaagccgtcatggttcctaaggcaatacaaattgcaggatgtaaaccaatcataatccctttttcgagtccaatcaaggtaaaaacccctaatccgatggtatcaaacaagaatagcgaagtacgcagtctgtcgaacttttttctgaaaaggatagcaaatccaaaccccaggatgattacatatacatattgcaaatccagcatccatcctacaggtgttctgccaatcagcacatcacgaagcgttcctccaccaacagcagtcacaaaagcaatgataaaaactccaaacggatccagctttttatgcatcgctgtcaaagcgcccgacatggcaaaagccatggtaccaataagatctaataaatgaaacattttttactttttagctgcaaaaggcgcagagccgcaaaggtacaaagcttaaaggtttttttattctttagtgcctcttctctctgattatttattttctaacataaattggacttctttttaacagataagaaacagaatccatccagctgtcttttatgtttaagaatggcttacgggtttgtgaatagattttcgttccgtttttatacatgtcaaaataaaccatgtaattgtagtaggtttgtgtacttgacgttgtagtcgaaatatcgtttgttttaagccttttattgttgtcactcactttggcatttccgctgttatacgttgaggctactgaaccttccgttagggtatacgacacttttgttgcgataatattgtctactcctaaaattctttgaagatcttcgattggggtttcatcgatatttttataatctatccctgctttgtgcaataaactgttggttactcttaaatcctgaaccgttaacggaaaaatattcgacgatttatccagtaatttgttgtacaaatcattctgagcaaattttgccatttcttctgaactttctaaagtgcctgagtttacataaggtaccggcagcacagcaatggtattgggtttcatttcagctgcagcaacggcctgtactgaattagcggaactcgaagtatttgatgctgttgcatttacagacacatcaaaagtttgagaacgcccgctcgcaaaatcaattctggcaatctgagatacgtcaagtgaaatttgcagtgtttctcccggtaaagaatattcaaccgctttatcagacatttttgcaatagtacattcaataatctgataatctctttttataattttatccagttttttgcttccggtctgagcaaagccaacaaccgataataataacattataattccaaaaacctttgtaattttcataatttctataatttaaatgatcctactcttaaagcttttcggtaacgcctttctaaaatcaataaatgtctccatagtacaactaaaaaaatcagcactacggcaagttgattttagtattagtaaaactacaaaaattatgaacttgataaaatgacatttatcatcctttttttcgcccctttaaacactacatatgctgcgtataaaaattataatctttgagaatgactctcagaaagtcgctattattgcctgactgatttttaattccggtaacactctcaattttggcaaccagtttataaatgatttcatgatcgtttttagcaagtgcactttgaaaagtctctttgataattcgcatatcattgtccgacaatttaattaccaaaggataagtcggaacataagcgtctccaatttcctccagaatagtgtggctgatgttgattttattttttaatgtaatcacagctgttccggcaaccatatcgcccaatcgctgtcctttttgactcgaaattatggatatcagccccacgattcctccaagaatagaaatatccactaatctgaaaaaccatcgcattaaataatctccaaatcccgcctgataaccgtcaatttttaccacttttatttttactaatttcttaccaatcgtctgtccttcaaaaatactttctaaggttatggtataaatgataaatggaaaatacagtagtaaaagtatagacattctcgaccagttatctaaggtattcagtactttatcgaaatttagtccgtaaaaaaataccagagaaattacggtcacataagccagtttaatagccaaatcaatgaaataagaacctattctttcccctatcgttgcggcgataaaatttattttgacattttgtgtcgtatttatagataattctgacatattttatattttagcctgcaatgagagaagttgccttcataaaacaaaataaagaaaaatggctggaatttgagctagctatttttggtaaagctaaaaaaaatccggacgagttagctaatttgtacattcaaatgatgaatgacctgtcgtatgcccaaacgtattatccgaagagcaaaaccgttatttacctcaatcatctcgcttcacaaatttatcagaaaatttataaaacaaaacgaacagaaaaaaataagtttctggaattctttgttaccgaagtccccttgctgatgtacgagtacaaacgctatttactgtatgcatttgttttgttttttctgacggtgggaattggtgttgtttctgccagatacgaccaggattttgttcgtcttattctgggtgattcttatgtgaacatgaccttagaaaacatcaaaaaaggaaacccaatggctgtatacggctccggaagtaactggggaagttttatcggcatcaccatgaacaacctttatgtaggcgcgagatgttacatttacggaattttcggaggtctgggtactttttatattttccttcgaaactgtatcatgctgggctcttttcagtactttttttacgaacagggcgttttctggaaaagtgtccgcggtatctggattcactgttcaatggaaatcttcgccattgtaatcgaaactacagcaggctttattttgggagcttccatcttgtttcctaaaactttctcgagaatgaattcttttaaaataggcttcaaaaatagtttcaaaatattcctgagtacttttccgtttaccatcagtgcgggttttctcgaaggttttatcacacgttattccattgacatgcccaattggctaagtagttttatcattttacttactttagctataatttcattttattatttgatttatccttttattgttcacaaaaaaacaactttatcctaatgtttgaactttacaaaaaacgacagctgggcgattatatcatcgatactttttccttttttaaaacttttggaaaacatttttttaagatctttttcatcatcaacggggcctttctcctaatcgtaggggctttggtctttttctttttaaaaagtaattttcaggctgtatttaatgatagcttagaccaacccgctgacaatcttgctggttattttaacgataattttgggctcttagctggctttgttgccctcttttttattgctgtaattgctttgtcgcttttcaactcgacttaccctattctgtatctaaaactggtggcgaaaaagaacaccactgattttaaaacagaagatatcaccacgatcttcagacaaaacatctggaaaatcatcaaattttgtattggacttacgtttcttgttgttccggtgttgttaatcgttatcatcatactcttctttttatgctttctaattgttgggattcctcttttgctaattgctattcccgctttatttacctgggtaaactttagtttttatgcttatctgacagaagataaaagtttctttcaatccttaaatcatgcttatcttttactaaaagaagatttctggacttccatcggagctacttttttaatcctgattatgatccagatgattcagggatcgatcaccatggtgttctattttgccggaatatttatggtcttccttaccgctatgggaagctctaattataatgcagaagcgatgagtgattctccgctcttgctgctatttctaactctgattttcatcctcatctttaccctgagtaatattttcaacaacatgatcatgatcaatcagggaattatgtactatagcctgggagcaaaagataaaatttcaaatcgcgacattgatttaatcggaaccgataatgaataaaatcttcctattccttttatctttttttattttctccggcattattcaggcacaggatactttggctacagccgaacctcccaaaataacagctgtaaaatacactgaaaaagatattcggatagattctgacaccatagaaattaagactttctctaaaaattttaaaaaaaaatataccggctccagcttcgtttatgaatttaaagctcctgaaaaagggctatggcagcgttttaaggaatggctggccagtatttttagcgattggttcgattttgaaactccgcaaagctctattgattttgtttcggttttaataaaagtactggccgttctcatcatcatttttgttatttatctcatcgtaaaagctatcattaataaagagggacaatggatttttggaaaaaacgctaagaaaaaaaatattatctattcagaaatcgaaaagaacattcatcttttagatttcgataaactgattaaagaaagtatacagtccggagaaaaaagagctgccgttagatactactatctatggcttctgaaagtaatggcacaaaatcagtacatcgaatgggacatcgaaaaaaccaattctgattatttatacgaacttcaaaagcctgcacacaaagaagagtttacctatctgtcttatctgtacaactacatctggtacggggagtttgagattgatgaaatcactttcagaaaagccgaaaaccgatttaagaatgccttaaaaacctttagcaatgaataaaacacttaaaatttacattgctgtactggttcttattctagctttaattctgattgcagatcgcgaacgtccaaaacctattgactggactcccacctattctgttaatgacaaaattccttttgggctctatgtttttaacaacgaaatcaatgatttttttaaaaatcataccgtagaacgaatttcagacctgactccttatgagtatttgacctcaaaatatgacaatgacagtctggtagaaaattacaaaataaaaggaacttttttaaacatctccgaatccaatactattgatgaagaatctgtaaacgaacttctttactttgtatcgcgtggaaacaatgcttttttgagcatgaaagactttcctcaatacctcttagacagtttaaaagtcgaagtaaatggggattatctcaattcaggcaacaccactgtttggctggctaactcccaactgaaggacaaaaaatataagtttgtacagacattagaaaattatttttctaaaattgataccgcaaaaaccagcgttctgggttatcagctttcttcggtcaagaaagcaaaaaagcacgtcaattttataaaaataccgtattatcaggggcatttttacctgcacacacagcctgttgcttttacaaactacaacttactaaaagcaaatcattatcagtataccgagaacgtcttatcctgtttgcccgagggagatattttttggtacacaaaagggcaaaacagcgaacgcatttctgaatcgcctctacgatacattttaagtcagcccggtttaaaatgggcctggtatttctttctgtttggcatgctgatttttattatttttaatgccaagcgcaaacagcgaattgttcccatactaaaacctttgcccaatttaaccgttgattttacaaagactatcggaaatttatattatcaggaaggcgatcacactaatatcattgataaaaagatcatttactttttagagaaaatcaggaatgaatatttaatcgataccacgaaactggacgatcattttattcaaaaattgcatcataaaacaggtaaaaatgtaacggatattcaggagctcgtatttttgattaacgaacatcgaaagagttaccacggcagtcttgaagaagatctgattcgaataaacaatgccatagaaaagattttacattagcccacggttgaaattaataaaaaattgatttaacacatagaaacatagattttttaggtatagaaaggaagcaaaaaaagaaatatatttctttcacatagaagcagatgtgtttttaaataaaatgaaatgccttttttatagacgctgaacctatgttactatgtgttaaaatgaattatcccaaacaggtttatattagaaaaaaatacaatcgaattcaaaaaaagaaaaactgaccatcatggacgatatcaatacaacatctgaaatcacaaatgaaaatgtgaattttgaaaccagaataaatttaactccacttttagatcacgttagcgcaattaaaaaagaacttgaaactgtaattgtcggacagcacaaaatggtcgatcagcttttggtggctattttatccaacggacacgttttactggaaggagttccgggagttgccaaaaccattacagccaaactattgtctaaaaccctgaacattggctttagccgtatacaattcaccccggatttaatgccatcggatatcttaggaacttcgatttttaatttaaaaacctctgaatttgaattcaaacaaggcccaattttctccaatttaatcttaatcgacgaaataaaccgtgcccctgccaaaacacaggcagcactttttgaagtaatggaagaacgtcagattaccattgacggatcggcctatcagttagaaactccatttctggtaattgccactcaaaacccgattgagcaggaaggaacttaccgtttgccggaggcacaattggatcgttttttattcaaaatcaccatcgattatccgaaacttgaagaagaaattttaattatccaaagagagcatttactacaaaatcacggaaaattagaggctgttaaaacgatactttctgctgctgaaataaaagaataccaggctttggtaaaacaaatcagagtcgagcaaaatctgttggaatacattgcacgaattgtagtcaatacccgtgaaaatgcattcttatatctgggagcctccccgcgtgcttcaattgctattttgaatgctgccaaaggttttgctgccatccgcggacgtgattttgttactcccgaagatataaaagatgctgccattccggttttacagcatcgtgtaattgtagcccctgagcgcgaaatggaaggcatcacaagttcagaaatcatcagacaaattattgagactgttgaaattccaaggtagttttcaggcgcaatacacagtcgcagtacacagtcgcagtacacagtcgcagtacacagttgcagtacacagtcgcagtacacagttgcaatacatagtcgcagtacacagttgcagcacacaattgcagtacacagtcgcagtacacagtgaaaactgagactgagactgagaccgagaactgaaacttgaaacttgaaacaataaaaacctgaaaccttttaaagcgtgaaattcatcaaaagcctttatcttaataacttctttttctatgtacttctgagtataattggattgtttgtctgtgcttttatttttccaaatttgtacaatgcggtttggtttgtggttttaattttatttactttcttagggcttgacgtactcctgctctatcttagtaaaactggtattgaagcggaaagaacgacaccggaaaaactttcaaacggagatttgaatcccgtaaccatcaccgttaaaaaccattatacctttaaaatttcagttaagataatcgacgaaattccgtttcagtttcaggtacgtgatttcaaaattgtaaaaacgattaaagcctctgagcaaaaagaaattggctacgaattacgaccaacagaacgaggagaatattactttggttatctgaacgtttatgtttcgtcaccgctaagactaatttccagaagattttcgttcgataaagacaaaatggttcccacctatccgtcttatattcagctgcgaaaatatgatctattggctttttcgaataatctgtaccaatacggaatcaaaaaaatccgtagaattggccatacgatggaattcgagcaaattaaagagtatgttcagggtgatgatcttcgaactttaaactggaaggctacagccaagaaaaatgctttaatggtcaatcagtttcaggacgaaaaatcgcaatccgtttacatggcaatcgataaaggccgctccatgcaaatgccatttgacggactgagtttactggattatgcgatcaattcgaccttagttttatcgaacgttattctgaaaaagcaggacaaagcaggtttcttttcattctctaaaaaagtagaaaaccgtgtttttgccgagaaaagagcttctcagatgcaaaaaattctcgaaaccttatacaatatcaaaaccgacttttttgaaagtgactacagccgtttgtatgtagacatcaagaaaaacatcaatcaaagaagtttgatccttttatacactaattttgaaacgatggacggtttaaaccgacagttgccttacttaaaaggaattgcaaaaagtcatttattggttgtcgttttctttagcaatacagaactaaatgcgatcatcaataaaaaaacggatacgattcaggaaatctacgacaaagtaatcgccgaaaaattcatgttcgaaaaacgtttaatcgcaaacgaactcaaaaaatacggcatccacgctgttttaacacagcctgaaaatttgactttggacaccatcaataaatacctcgaaattaagtcgagaggaattttatagcagctgtacgatagtttccgcgaatataaaaagtgacgaagatgctactagaacagttctgttgtattatatgcctaagtaaaaatcgggttcgttatcagcaaaaaagacagaaaaattaaaccggaaaagataaattctaatccggtttaactagttactatttgttgtactttcaaaatactctttctcaataaataattaaagagtataaaaaacaaggagattccccctaaaccacatacagaatttactgataatcctctcctagtctgcttctaattatggtaatattgggttcatgcttatgctcagcatactgtacgtaaaactcagaagctgtagacataatatctctatgccatatcccaaaaatccaccaccattttctataaaatattctgttattgtgttccgctcctaaaacatgaccaatttcatgagccattgtattggccccaccaatggtatgagccgtaaatgcagggaaccaagtactactactacctccataaaaataggaatctacataagccttccctacaacattatcagtagttgaccaaaaaagataaccgtagatcgtatttttttcaggtgttctaaatttattgcgtaagaaagaactaaatttctctaattttccacccgtatctgtgttagtatcaaattgcccctgataagtcttgacaaaattgatatggcgattcttgcccatcgaaaatataaaatcattccaagcccaattaacttcgtgagatataggtgtgtttgaattgtttccctgataccaaagctttacggttactacttttttaggggtttctcctaagtactcccaagaattattacttgtagaattaacaggaaaatacccgtaataccagtaattaagcctgaaaaattcttttttcttattccatggattattgtattcatagatatcccctgcctgacctacattattaggggagtgctgccagtcataaggccccaaaaactcccaatcttcattgctttttctatttactggaaaattggaatcaagacgatcttttttacaacgaaaatattctcttctttttgtaacttggttatcattaacatatatttcgccaacacgtttataacgaattgtagagttccacatataggcaaccttattcccaaaaatataatcatataagaccgaattagagccagtagctttagaggaagagcccgaaataacagactcacctccattcttagaagaaatagaagagcccaaagtggcataggagagcggaagacttacatcctgtatcccttcatctgcaactccacagcccaaatttgactcctccccgctgaaactgctagaagacaactgtttatcagtcttgttatttttagcagaaaaataacaagaggttttatctgcattataaacatactcacctttagcattatctgaattgtatttcttagcagactcattagacaaactaatctgaggtgttgtaaataaagctattttttttgactcccccttaaaagaagaactgatataggcatgatctcctgtaagggtaataacggcctgctcaaatttattctcaggcccggattttgatataaatgtcatttcttccttcccattttcatcttttgacagaaaattttcagctctttccaaacctactataacacataaggtgtcttttttatcttttaatatgatattcttatcggtagaaaacttcgtcgataaactagataaagaggatatgctcttatttatatcaagcacatcaaaagatagctcatcatagacactcgaagaggtcttttctgtattagaatcttctgcacaactgaagaagactaaaataataaaaataaatactaatgcatttctcataattttaattttgtgtttgttaaacaattaaatggactttttcaatttcaatactcttttaagctcgattgtcgcaaaacacatcccgctaaacactttttaaccaataagttaaatcatacaaagcctgtttactaaaaaccaaaaacaatccctcactctcctttcggatgttgttctttcctatgactcatcgccaaaatataaagttatttatactgatttttttctcactaaaagacaatggggactataatctcttttagattcactgttattttttaatctttcagaatcggatcctgatacctgtattcaaaataaataactgctaaaaaaaacttaatttaagacaaatctaaaaaaaacaatctaatcgtacaaaaaaacttacaataatatttataaaagacattttttacttacaaaaataatttgtactgtcgtttttgattccaaaagagtctctcattctcttctagaatcaaattcttagaagcctgcttctaaatctcaaaagacggtccgcttaattaaagtttttaaccggataacaaaattttctatcacttcttggaatttgaaacaaaaacttaacctatatttagcgttaaaaaagaaaaacctttgcaacttagcatctcagaatctcagtaagttaaaaaatatgaaaaagctcattttactcgcattctttttttccggtttttactctcatgcacaaaaaaccgagaacatcatcattatcaccaccgatggttttagatggcaggaagtgtttaaaggaatggacccttcaattgccaatgataaaaaattcaatcagggagacagtacctatatttataagaattatgcaagtgctgactccaaagaaagccgaaaaaaaatcatgccttttctatggtctgaaattgctgcgaaagggcaaatttatggccatcgcgagttaggaagcaaagttgatgtttccaacccatactggttcagttatcccggatacagtgaaattatgaccggaaatgttgatgttgccatcaactccaatcattacaagaacaatccaaatgtaaatgtcttagaatttttaaaccagcaatctaaactaaaaggaaaagttgccgcttttggcgcctgggatgcttttgatcgaattttaaacgagaaaagaagcggttttccggtaatttctgccttcgataatgtgggaggagacaaacctacagaaactcagaagttattaaatgaaatgcgcaacaactcgtttaaaccttttcatcaggatgagtgtttagatgtttttacgcactatcaggctttgaacgaacttaaaaccaaaaagccaaaagtactttacattgcctatggagaaactgacgaatgggcgcacgccggacactacagatcttatcttgatgccgcaaaccaggtcgacaaatggattaaagaaatctggaattttgtacaaaatgatccccaatacaaaaataaaacgacactggtaatcaccgtagatcacggtcgtggtgacaaaacaaaagcacaatggacagatcatggtgccgatgttgaaggtgcctcacaaatttggttcgctgcaatggggccagaaattgccccaaaaggcgaaatcaaaacagattctcaactgtatcaaaaacaaatagcacaaaccatcgcaaaaatcatgggatacaccttcactgctccgcatccggtagcaaacgaaatttcagaagtccttacaaaataaaagttttttttgccacagattaaaggattaaaaaggttataacctttaaaaatcttttaatctgtggcaaaatatttttagcattttagaatctcagtagcttagcctctcagaacctaagcccctccaagaaaaagcctctgaacctttacaacttttcaaaaaaacctcagtgacttagcatctcagaaccttagcatctccaaaaaaacctttttaaaaaaaatctcagtaccttagcccctcagaacctaagtaccttaaaaaaaattttacatcagttttcctcctctaccccctgtagaaaaactcagtaccttagcacctctgaaccttagtacctccaaaaaaacctgtgcaactttttaaaaaaaatctcagtaccttagcccctcagaacctaagtacctttaaaaaaatgaaacaaattacttcagtacaaaatccgtttataaaatcacttgttttactacaggaaaaggccaaagcccgcaaacaaaccggaacatttttgattgaaggcttacgtgaaatttcactcgcaataaaaggaggctacgaaatagaaaccgttttatttttacctgaattggttactgaaaatcagattcataaattggtaaacagtccggttcaactcattgaaatcaataaagaagtttatcagaaactagcgtatcgcgatactactgaaggcgttctggctatagccaaaaccaaatcgatgcttttatcggatctaaaactatctgataatccattgattgtagttgccgaagcaccggaaaagccgggaaacatcggcgcccttttgcgtactgccgatgctgcaaatcttgatgccgtattaattgccaatccaaaaagcgatttatacaatccgaatattgtacgctccagtgttggctgtttgtttaccaatcagattgcaacaggaacgacggctgaaatcatagcctttttaaaagaaaagaagatcgatttttactgtgcaacactccaaaattctacttcgtatcacacacaggatttcaccactcccactgcattggttgtgggtacagaggctaccggcttaacgcaggactggcgagatgctgctactcagaatatcatcattcccatgcagggcgaaatcgacagcatgaatgtctcggttgctgctgctattctaatattcgaagccaagcgtcaacgcggatttaactaaaccaaaacataccgtcatgaactacaaattatcacttttagccttcttatttagctttaccctttcagcacaaataaccaatccggaagtagatgatctggtcaaccgtaccctaaaagcatttgatgtgcccggaattgcagtggccattgtaaaagacggaaaagtaattttggcaaaaggttatggtgtaaaatcaattgcaacacagcaaaaagtggatgccaatacgctgttcgggattgcctccaacagtaaagcttttacttcgggagcactggcaatgctagttgacgaaggtaaaataaaatgggatgacaaagtggtaaaataccttcctgattttaaaatgtacgacgattatgtaacccgtgaattcacgattcgtgacctgttaacccacagaagcggacttgggcttggagccggagatttgatgatctggcccgacggaagcgattttaaagcgcaggatattattcacaatctaaggtatttaaaacctgtttctggttttagaaccaaatacgattatgacaacctgctctatatcgttgcaggcgaaattgtacatgtagtaagcggtaaaacctgggctgaatttgtagaagaacgcatcatgaagcctttggaaatgagcaatagtgtggcttcagtgaaacgtttaaaagacaccacaaacgttatcacccctcacgttccggttgacggaaaactcaaaactataaaacgttatgaaaaccaactttttgatggagcagccggaatttattccagtgtaaacgatttaagcagatgggttattttacagcttaagaatggaaaatatggcgataacaagcagctgttttcagaaaaagaacacaatgaaatgtggcaattgcaaaccattattcctgcaaaaacaagaccaccgtacaacactcatttctccggttatggtttaggctggttcctaagtgatctaaaaggatacaagcaggtttcacatactggaggactggaaggaaacgtaactcaaaccactttgattccggaattaggattaggaattattgttttaaccaatcaacaatcgggagcagcttttagtgccattaccaatacaataaaagacagttatctggggattaaatcagaagactatgtgacgatttacagtactcgaatgaaagacagcgaagcatcggctgataaagtaaccgatgaagtttgggcaactgttgctaaaaacaaaaaagacaaactaaaaactgatttttctaagattaccggaacttacaaagacaactggtttggcgaaattaccattaccgagaaaaaaggaaaagtatattttacttccaaacgctctccgcaactggccggtgaagtatttttctataaagacggaaattacgtcgtgaaatggaacaatgctttctttcatgccgatgcacatctgcttttcaaatacgacgaaagtggcaaagtccttaacttaaaaatgcttccaatttctgaattaactgactttagttacgattttcaggatttggatttttcgaaagaataattttagattcttagattcttagattcttagattcttagattcttagattcttagattcttagattcttagattcttagagtattatatatttaatataaataaagtttttttttcttacaacttaagttttaatattcttttttaggtagattaggtaagaatagtgtatttgaaatgaggattttgttaagtactcttttggtaaatttttatatttgaattatctgatatagagctaattgttgaatttttaatcattacttatgttattaaatagaagaatatcgcttttgtactttgttaatgagattagatcacagattgtactgatcgtattatttgcgatatcaattggactgctcgacatgcatcccttatttcaacaagtatctctgccgttaagtattccggcattagtaggtactgcggtttctcttcttcttgcttttcggacagcgcaatcgtacgaaagatggtgggaagcccgaaccgtttggggagcgatagtaaatgattccaggactttaatccggcagataatccaatttacaccaaaagaaaataaagagattgctgatgcttttacagaaagacagatcatctggctttatacactgggagagtcattgcgcaaacagcagttttcaccaagggtacagacttatcttgatacttttcagatcaaagcatctaatatccctaatgctttgttggataaacactccctgaatattgcagaattggcggcacaaggactaatttcagagtttaaacaggtgcagttaaatgaaacattagccagactttgcgacagtatggggaaatgtgaacgtttaaaaaataccgtctttccaaaatcatatagtgtattagttcataccctgatctatgtatttgccgcgatactcccttttggactcgaagactcacagctggtagtagagattcttataacgatattgattcctgttctgtttatttccatagaaaaaacagcgattataatgcaggatccttttgagaatacgcctgttgatacaccaatgacttcgttggcaaaaacaatcgagatcaatctgcttgaaatgactggggcagaaaatatacctgtaaaggaaaaaaatgagctttattacgagatgtaataaacttaaaatggagccttaaaaaaagtatttcatcatggatatagagtttgaactgttactatctgccaaactactgttggcgcttttattgggaggaattattggtattgagagagaaagagaacagcagaatgcgggtgtgcgaacttttgcctgtatttgtgtagcttcttgtctgtttgtttctattgctgcccatctcaccgaggataaatcggctattgccagaatgcttgcggctattgcaacgggactaggttttataggggcagggctaatttttagagatgaaaaaaatctacctaagggattaaccactgcatcgggtttatggacaacttcggctgtaggtatggccatcgcgctcaatatgtttgttatcgccatctgctcgacagccattatcctgtttatttttacaattaatcaattctcctggtacagaaagtttgtggggaaattatttaaagataaaaacctgaaaaagtaatctaaaaaaatagcttaggtattgagtgtgaaattactgagaatcacaaaaagagatttctttcaacaatgtaaatttgtatttttaattcatctataagacagtaagaaattaaaaaagaaatagcattggtcacaaaaattaaaacgtataaactacgggaactgtaaaaattgaaaaagatcagagcaaacgcaattacctgcaattggccgaaggttcagcaggttcaaacctaaaagtggggcttttcaaaaagaatcagtaagttttgaaatttcacgctgaaactttttttataaattaggatcgtgtgactcgttaatctgtactatgttaaccctaaattggcatatgttatctgattgtgcatgaaatagtattaagatagaataatcttctatttttaatgaaatttcaacaaaacacatgcaaccaatatcgcttatttcagatcattttattgaagaaaaatgtaattttaaagaacttatagaaagacttcgggctgggttttcgagttcggatatcaacgtgcctatgcgccatcatcatgattatcctaatccggaagagggcaaagattctacactgctgctaatgcctgcattccaattgggtaaggacttaggggtaaaaatagttaccgtaagtcccaataatggtaaatatgacctgccttccattcaggggacttatatttatctcgacggacacaaaggaaatataaaggcaattctcgatgcaaaatcactaacagggaaacggactgcagcaacctctgctttggcaagcagctatctttcgagaaaagactcctcgtctatgctgatgattggtactggagcattggccatcaatttaattcaggcgcatgcgagtgtaagacctataaaagaagtttatgtttggggaagaacgatagaaaaggcacaattggtttgcgatgcactcaaaaatttcccatttacttgcaaagccgtttcaactatagaagaagttatttctcaggttgatatcatttcgtcagcgactttatcccccgttccacttgtttttggaaaatggctgaaagcaggacagcatttagatcttgttggagcctacaaaaaagacatgcgtgaggccgatgacgaggcggttctaaaatcgagcctgtttttggatacctatcagggcggactaaaggaaagcggcgatattttgattccgctgacaaccggcattatcacaaaagaaactattaaagccgatttgtttgagttgtgcagtactgtaaaatcgggcagaacctctgagactgaaatcacttattttaagtcggttggacatgctttagaagaccttgtcgcagccggatatttttatgaagcgtataatttaaaagcaccaaagaatgtctagtacctaccaaaatatttgtaatactactgattataaggcagacgcttccgtcctgcagatcaaaacaattgatatgcatacagggggagagcctttgcgtgtaattgtttccggttttccgaaattgaaaggaaatactgttttagaatacagaagagatataaaagaaaattacgattacttaagaacggcattgatgtttgaacctcgcggtcatgccgatatgtacggttgtattttacttccgccaaatgatgaggatgcagattttggtattctttttatgcataacgaaggatacagcagtatgtgtggtcatgccattattgcgataagtactttggcagcaaaaatgaaatggatcatcgtaaaagaaggtgagaatgaattgaaaattgatgccccatgcggtcggattttttcgtttgtcacggtagcaaatggagaagtaacgggagtacggtttcattgtgttccaagttttgccgtaggtttagatcgtgttgtaaatgttgaggccattggtgatgtcgtttatgatttggcttatggaggtgctttttatgcttatgttgatttgagaaaaaatacacatttgaattttggattaacggaagaaaattaccgaaccattattcaaaccggggtcgatatcaaacatgccgtaatgaagcaggatgccgaaattctgcatccgtttgaagaagatttgagttttttatatggaactatttttatcgatgaaccgctgaatggtgctaaccacagccgaaatgtttgtgtttttgccgatggagaagtcgatcgttcgccaacaggttccggtgtttccggaagaattgcgattgaaaaagccagaaatgctatcaactcgggtgaagttattacgatagaaagtataacaggaagtacttttaaaggatcacttgtcagagaagaaaaatttggtcatttcaaagctgtaattccacaagtggaaggaacggcttttgtaacgggagtaaatacgtttttaatagatccaaaagatcctatgaagaatggttttatactaagataatccagaatcacaattagtataagattgggaatttttaaggaaaaaaaagctctccataagctttcaaatcagaaagcctatggagagattttttttattcaaacacgatttagaaaaattggatcttttatttttattttttgatgtaaccaaattaattctatttttaacgaccttttccgttctttgatatttcatctaaaagtagtgattttaaaagggaacaaaaaatgttaaagagtttcagtgtagcatttgaattaagatataaaaatgactttatttgtataagtataatcaataggtaagatttttttataagatttttctcttgttatttgagttaattttgattttaaatcaaatgaaagaaaagtattacgttaataaaatgttaggaaatatgattattttaaataaagtatttattttgcccaaaattctaaatttcttctaaattgaaccattgctttacttgtcattaaaggttattatatgagaatcgaaaaaaaaattaacaaggtttcggaagacggattatgtaaattatccgttttttcgaatgtttccgtttttttttcgtttttctttcaaacggctttttattattggtactcaaaaattgccagtttcatttcagtttacttttttaagattttatttcccttacgtaaagggggatcatttgtgttattttacttagtatatcttttacttttctccaaaagatggataggtacttaaacggttatggattttttaatctcctcttcattttaattacaaaactttgcggagggaatgagcgataattgttaaatcgctttcctcttaaaaaaataagcagcctttaaatttaccataacaaacaacacaatgaatactagtattattaaaaattattctaaacttaagttctccttatattttttgcccttattctgtttagctgctctagtactgtttctttattatgagaatgctttaagtgtttataattacgcacaaattcaaaaaagcacctttctttatattaattcccatttagggctttatcctaatttacaatacaatcttactcaattaggagatgcttcgatttttttatccttcttagccctttttatactctatgcacccaaattatgggaagctttgctgtcgggtttattattttcgctattattttcctgtccgttaaaagcaatatttggtgttccaagacctgccgtaatttttaataatgaaattacctgtattatgggaagaaaattatgtggcttcaatagtttgccttcaggacattcgattgtagtttttactgtattgaccattatcttatttgcctttatgccacagcgattgaaatttaaaattctgtggtctgtatcgatcattacgataggatttattttagcatttacacgagtaggtgtaggggcacattatccccttgatgtaattacaggaagtattctgggttatatttccggaatctcaggtatttttatcagcagaaaatataaaataggggcctggatcaacaatgataagtactatccaatttttattgcattgtttatcatttgttgtatttgcttggtcggcaaaattattaaagaaaatttgattatatattatctttcgtttattagcttagcagtctcactttataagatcacttatgtttacgttaaaaaataatttaagaataactcattttgtcctattgatgagttttttgatttttttgttcttccacctgccgttttacacctttgtttttaacaatgtcgattataaaagtctaaacggtattgttctgattgtgagtttggtaattctaatgctggttcttaatgcatttgttttatacctcttgttttcgctttctcgtcatgtcgggaaagttttgctgatcttgttttttattgttagttcaattgcagtctactttgtgaatacgtatagtgtcatcattgacgaaagtatgattggcaatattttgaatactaattacgaagaatccagcagttttttttcctttaaagtaattttgtatgtaatttttcttggaattattccgagtatttacattgcaaaggttaaaataaccaaggtaccatggaaggagttttcaatcacttcttcactaactttagtatttattgccgttttgatatttgttaatgccagcaattggctttggattgacaaaaattcgaaacgacttggaggtcttgcaatgccatggtcttattcggttaatacaccgctattttacattcataagttcaagaaaaatgaaaaggaaattttgctgcccaatgctgttataaaagataacgagaaatcggttgtagttttggttatcggagaatcggccagaaggcaaaatttttctctttatggctataagaaaaacaccaatccgttactttctaaaacagaaaatgtatttcattttaatgccaattcgtgtgcaacatatactactgcaggtgtaaaatgtattttagagcataaaaacagcgatgatctctatgaaatcttgcccaattatttataccgaaataatgttgaagtgatttggagaacgaccaattggggcgaaccgccagttcatataaagaattatcaaaacaaggaagcattaaaagccgactgtaaaggtgtggaatgcgattatgatgaggttttattaagaggattaaaagagcagattcaggccagtaaaaagaataaaatactaattgtgctccataccagtacaagtcacggacctacatacagtaaaaaatatccaccacaatttgagacgtttaaaccagtctgtaatagtgttgaattgggtaaatgttctcaaaatgaacttcttaatgcttatgataatacgattgtgtataccgattatatacttcatagcgtaattgaggatttaaaagaattaaaagaatacaaaagcaccatgatttttgtttcagatcacggagaatctttaggagaaaaaaatctttacatgcacggtgtgcctattagcattgcccctaaagagcaatatgagattccgtttattgtttgggtatctgacaattcaaaacagcttaagcctaatgaaacattgactcaaaaccatgtttttcatagtgttctaaaatttcttaatgtcgaaagtccggtttatgatgagaaaatgaacatttttaaataagaagtttttgtggctttgtcgcagctgtggtaacttgttatctcagccatttctaattgagttggacagctgcgacagaagctgatattgaccataaaaagaacttttgaatacttatacccgttgggtgtaattatttttaaaaataggagaaaaagagactttctttctgtaaaaaaattgatgtctctatgcgttaaatatttttttgcacgcagatttcgcagattgcttcgcctgttcgctatcgctcgagtcttcacagattgtaaattttttaatcctttaatctgtggctattattttaacacataaacatagactctcttattaaaagtaggacgtttcacatttcacttcttatttttttcggagaatctatgtctttatgtcttaaatgatttttgccaacagccttattttaattttttttgatcagagggataaaaaatctgctttctaccaattaaaacaggtagaactacgcttaaaaatcacagttttagtgagtttatttgttgttaccaataacatatcaaacaaataaactccctaattatggaaaactacttacacggcctactcgacgaagagaatgacccaattattcaacaatatttaaaatacatagacgaaggaattccccgtacggataaaccaaaagacgtattgatcattggtgccggaatggccggaatggtagcagcggctatgttaaaggaggcaggccataaggttacaatagtggaatctaatacccgtgttggtgggcgaattaagactttccgcaattctaaggacaaaaaatattttgcagacgataccgtttatggcgaagccggagcaatgcgcatcccgaccatacatcagatggtactcaaatacattgataaactaggactcaaaacggagcctttctattatttgtctgtcgataaagcccaggcaattgcatatcaggcggatcctgacgaatcaaaaccagaggttacaagaaattctcttttctatatcaaccgaaaacgtgtggttcaaaacgtatattttccaaaggatgcgagtgaaattgtcgatgtaaaccaattgcttgactttcatttggacagtagtgaaaacatgcgcgcagaccagttaatggccagtttgatcaatccgcttaaagattttattgcagaagatccgaagaaaaactggcctttgctcatcgatcgttacggagaatattcgatgcgtcgtttcctgaaagaaaattcaaagtattcagaaaatgcgatcgaaatgattggcgttatccaaaacctggaatccagaatggcttatgattttatccagagttttatagaacagaatattattaaagattctacgcgatttatggaaattgtaggtggatgtgacaagctgcctaatgccttttttaaagctcataagctagaagaaaatacctatttcgattgcaggatgacaaaaatgatgcttgtcaatgacaaggtcaaaatagaagtagatatagaagtgcagcgtaactcccagttttatgaagatgcagggttcaaagtattagatactcctgttagtgatatggaatttgatgaagtaattgtcagcataccattttcggcattaaggcacgtttatgtaacaccacaattcgagcaacagaaacgaaaagcaatccgggaactgcattatgattctgctactaaaatattacttgaatttcgtgaaaaatggtggcaggaagctccgtataatatcgttggcggtggtaccattacggatttctctaaccgttttacctattatccgagtaatgatttgggaagtaacgggcatggtgtagtactggcgtcctattgctggtcagacgaagcgagccgctgggattctatggatgatgatgaccgatatttctatgcactgaaaaatctggccatcatgcacagcgatgatgtgaaagaacagcagcgtattatcgaccttgctgtaatcagctctagcatcaaagaccgcaaaggaaaaaccggaaaattaatcggtgctgcaacacaaagctggatgcgcgatccttatgcttttggcgaagcggcaatcttcaatccgggtcagttacagttattacaacgccatatcatttcgacagaatggaatggaaaagcacattttgcgggggaacatacttccctaaaacatgcctggatagaaggtgctatcgagtccggaattcgcactgcactggaagttaatggaaatgttggtaatcttaataacccgatttaagatgtcagagcaaaaaatatcagtagcaaaatacctgcagatacgtctggaagaattaggacttacccacttatttggtattgcaggcaattatactgctccgtttttaaatacaatccttgaagacaaaaaggcaaaaattaaaatcgttaatgatacaaacgaaataaatgcaggacactgtaccgatgcttatgcacgacaaaatggttttgcagcagtagcggtgacctacggcgtgggagcatttacgttgttgaattcggttgcagggtcttatgtagaacattgtcccgttttggttatcaatggagctccaaccaataaagatcaacagcgaagtcttgttcagggaatgctggcttcacacatgacaggtgatatgtacagcaatatcaatgtgtttcgtaatgttactgttgcagccgaacagattacaggttcatctgacgctccttataagattgatgcagtactgaatgcctgtcttttatacggaagaccggtttaccttgaagtttttgaagacgcatggcgaatggaatgcgatgcacctgttactccattggtagaaaaaggtgcgtcaaaatgccagacgagtgcacgcaaggcagctcaaagggttgctgcaatggcccgtggaaaagaaattattttctggggcggaattgaaattcagcgttacggcattcaaaaggaatttttagatctcattgaaactaccgatacggaatttgtaacttccatactcggaaaatcgatcgtttctgaaaatcatcgtaaatttaggggtgtttttaatggcaaagcatccccaaaagatgttaagcaacaatttgaaaaagcccaggtaaaaattggtctcggtgtatggaccacgggtaaaaatctgggtggttttgatgtttggaaagaggacacggtactcgcgaatcacagtggtgtaaggataggtgcttcttatgtggccaatgtatcgttaaaggattttattattttcctgaaagaagaactcactaaagtttcctttagtgcctatgagatgtatgacacggaaaaaaagctgccgaaatcattttttgtggctgatggcagcatagcaaaaaatgaaaaaccacttttgacctatgatacttttttcaaacggatcaatagttttataaacggcagccatatagtagttgcagatgccggttttcctttattgggagctcaaggcatccgtatcgcagaacctaacggatttgtggcacaggcatcatggctttctatcggttattcggtacctgctgcaaccggaataaaatgtgccagaccggataaaagaccggtggtatttgttggcgatggtgcttttcaggaaacctgccaggccatatcaacacagaacaaactgaaacatgatactattgtttttgtattggataatggtatttatggtattgaacaaatgcttgtgaatccaaatcctttccgtggtgctgatcaggtagattatgatatccctgatttaaatactgtctatgactacaatgaaatgcatcgttggaaatatgctaaactcgttgatgtgtttggagggaaaggttttgaagtgaacactctcgatgaactcgaagacgttttacagcagcttgatactattaaggaaaatacaatcatacacgtgaacattccaaaaacatctattccggaagcgattgcctataaaacggaggagccgggagaggatgaatttttagataaagactggagtttgtgttaggttaaaaggagtggtcttgacatttctataattacttattatttttagaaattcggatgaaaaaaagaaaaagaacagagtgggagtaaactggaggatagatgaaatctatataaaagtttaactttaaaagtaagcaagtttcactctgttctcttttatcaattcagttaatttttctttccagttttgtgctattgagccgccagaatcattatcataattatcatcattgtcattaataatgttatttaataaataatttacagctgctataatttttctttcagagacagttgttggaactcctccacgcaatacatgatgatctatcgatgacagtgatgcatagttaatggtaaatccttcggtaagtattttttctcctttggtattaaaagaggtatcgcatcttgatagagaggttagtatttggggagaaacccaagaaccacgagaaagcctttcccagtataaattaattaaacggtctctttttgcctgactaatcaataataatgaaaccgatgctactaggtgagctctccaattttcctgctctaataataatctaataccttcactaattttctgttcagagtttgtttcgagtatggcttctaatttcgaaaaacttaattttaagttgaaactttgagattcgtcactggtttgttctactaaacttagaaaaggcaaatggtttggctgcccgtcccaaaaatccttgaaaatccctaaattcatttttaattatatttatgcagttaaacaaatgctaatatagggaattaaaagcctaattacagcttttgagtattgattgatactagttgaataatgctccttgttaatggttagcagtttctatctgcacctttgacagaggttggtgaaggtattattattttaagaaagataagaaaatatctttccagctctattattcttttatagtagaataagtgttttttaatgcaatatagttgcattaattatatttgtttgtatttttacagtattcaggacagattgggggttttgagttgatttaaaatggttagtaattctgtttttgaatcctattatttatttccaaagaaagcatacttgtttaaagaagttaataccctatatcattaaattagaataataatgaacagacgtaaatttttaaaaggatcaacagtaataaccggttttttcgctcttaatccttcagttattgtttctaataatttagaaacaatgtcaaaaaaggataaaaaggccaaaaacataatttttttaataagtgacgggatgagttccggaacgcttcagatggcgaatctctacgctcggaatattctgggaaaaaatggaaattggatagggctttatactgaaaataaagtttcccgagctttaatggatacggcatctgcgagttcatctgttactgattctgcagctgcaagttcttctttcggaggtggtcatcgggttaaaaatggcgtattgaatgttggcccaaatggagaaagatatcttcccatttggcagaagtttaaaaatgagggaaaaaaagcaggctgtgttacaaccgtttccattacgcatgctactccagctggtttctgtgttaattcagaccggagaagtgctgaaaatgagatagcagaaatgtacgcagatattggtttggacgttatgctagggggaggagatgatttttttaatgcttcaaaaagagcagatcgaaaagacatttacaaaacttatgaagagaaaggatatcagatcttaaagcaaaaatcagatttaaaaaaaataaagaaaggaaaaaagacattgggtgtttttgcttcgggagcacttccttattcgatagacagagctaatattgaggatttacaacaaacgcctactcttgcagatatgagcgcagcagcgattgaacagttaaaggatcatgaagaagggtttgtattattaattgaagcaggaaaagtagactgggctgctcatgccaatgatattgccgccctgattcacgatcagttggcttttgatgaagctgtaaaaattgctattgattttgctaaaaaagataaagaaacattggttatcataacaacagaccatggtaatgcaaatccgggactaatatatggagcagatgctacagaaaaattcaacagtattgcggagtataaatataccaatgaatatattttaaattccattcatagcgactttaatcaaaagcaaatcaaagactggatatacgaaaccaataaaataaatctaacggatgaagaagctgctcatttgttgaatttttattcggggattgagaaacaggagagcggtttatacaattataaaaagttgccttttaaagcttattctgaaattcaaaaaaagcataacaatataggatggattagcatggaccattccggggattatgtagaactggctgcatttggacctggaagtgaattgttgaagccttttgttcagaatatagatttgcattatttaatgctggaagccgcatcaaaaagtaaaatttaaaacaagttttacagtttttgcgttagaatcgcactcattttctgtagtagaactggaagcagttccagattatcatcttcaatttgcatctttcgtatggaggtgtaaatgtttttttagcctgtagatgggaagataagtaaacaatatcgaaagcaggcctgcaagaacggcatccagaagagccataagggttggatctaatttatggttaaccgttaagctctgctgtgcaagaagcaatacagttaataccagtaaaccggttgtgatgccgtgcagcaggcataattttgttataaacttgtttttattcaacttatggtctattgccacttcgattaattcttgtttggaggcaacaataacccgattaatgatatccattgtcaggattacaggcaaaaagatagccattggcaatgttaaacgtgctaagctttgaggaccggcaaaaaaatgagtatatcctaattcctggaaactggcataagcaataataaaattgaaacatacgttgggaaggatatagtaaatggctcgctttcttaaaaagcgtttgagggatgtttttttggactgagctgctgttttcatacgtaatttataagggtaaagccagtatttctaaggccttatctttaatttttgaagcttcttgtttcggtaaaaagtcttcgttggacattaaggtaaagtccatctgatcgttaaaggtagtcgtcactaaagtgttagaatttagccagggaaacgctactgttggactgaagatatcttccagaatgaaatttttgtaatcgttccggatttgaaggttacccatattcgacagcgtcagatcgtgtgcacctcggctggattttagcagcgcaatcatgcgatgtaccagagggtgcatctgttcccccatccatagcagttcccgggcgtccattttttctattttttgagcaagatcttttttgatgtgtttcgcctgatccagtatctgatttttttctttttttaaagacagttccactgttggggcaaacgcaaatatttggtcttttctgatttcaggaataaaatggcggatatcaataggactgattaccttttttttcgctgattttccttgaagctcctgaaaagcctgcataaaagcggtacaaagaatggcgtgtactgaaataccattgtctttgcatttctgctttataatggcagagtttgtcggatctaatttccaatgaatggcataattttttccaagatttctttttttatttttccgttgcagtaaaaagaaaaatttccccaaaaataaaaaaagctttgctttgcgagcctttttttgaagatcaaactgtggtgccaggaaattgttgaccgattgaaatagtggatagggtttcagatcaagtgttggattatcgattaaggcaagtaattcctgcatcaaagtcaccatgctggttccatcgcagatacaatgtggcactacccataacaattcagagaattgctgtcctttgatccataccaattgagccaaaggggagccttcgcctttaaactgccgataccattcctgttccgattccactaaccaatgggtatcggtttgacgttttacgatgcgaagcggaataggtttcatattttccctgatggcataaaccggatgctgtttatcctgtaaatcaacctctgcacgaagcaatggatgtttgtgttggatttttgctaaagcaatttcgatctgttcttttagaatttcacctttgatttttgccgtaaagacacagtttagaggtgtggcgggatccacatacatgattcgttccactaataagagttttcgcttgttcatgaggctgcttgataatttaattggtgtttaatagaatcaattatttcatcacgaatggctaaggcttcgtgataaggcaaataaccttcacttcccataaaggagaagtcgataacaccttgataagtagaggtaaggatagttgttgtattgcccaatggcccaatgactgatggactgcgaatagtttccaacacaaaggattggtattgatgggggatctgaatacgacccagattagaaaacatacaatcgttggaggacttgcctcgttttagaagttttgtaaagttgttcaacgccttatgagcagattccataaccatcatggtgatataaggattaagtttggcggttttgcgatctacatgctgctgcatgacacgtaaattgtctaagaaatcgagtttaggatcagatgacaggacgatcatcagaccgaaggcgaaaatatgatctttttttacctgaggagcaaagcgcctgatatctaccgggcaagaaactttattaaaggctttgtttccgcgcactttcttaaaggtgtccaatacgatagcacttaaaaaagtgttgacggtgatggctagtgattgacaatgagatataagctgttgacttgtggccggatctaatttccaatgaatcaaatagtcagtttgtcgatcaatcgctttcttgctgacgggaatgcatttgatggcgaatgttgccagtcgaccaatcatttttgccttgattttttgcctgttactatttaaaataggggaaggaacaacgtcctgaatacctaaaataggattttcaatgcctatatctgctgtaggattatccaatacttttaaaaattcatcaattaaattcatcgcagcaccaccatcacatagacagtgatgaaaagtcagcagcatatctgaagtatcatttcctttgatccacaccaggcggatcaaaggtttgtttttgtaatcaaaaagtgtctgtaattctcgcaaggtttcttgttgccagtcctcttttcttttttgatctacaatacggataggaattggattcgctagtttagatacttcaaaccacgggacattgttttcatcgagctggatgagtgcccgtagccagggatgttttttctgaagtctgcccaaagcatactgaatctctttttcctccaatacaccgcgcaggcgaaaaggaataacaacatggaaggggtcttttccttctcccaaaagcatacgctctccaaatagcaatcttcttttcataattttatactgaagccaaaaccaaacgttcttgttttacaaaatcttctaataatgcaactgctttgtcattgccacctgctgttaagaaagcagtttgaacttctttggctgcatttctgtatttagggttttctaaaagctcaaagactgtttttctaagctcttctattcgaagtcgtttgtatcgaatgctgattccacaacccgcttgttcaatcaactttgcggtatgaaagtgatcgtaagcgattggtgtaatcaacatcggcagaccattggtaaaggtgtcgtttacggtattgaaaccaccgtgacagatgaccatatccatatggggcatcaatgtagattgtgggacaaaaccatttacgataaaattggaaggccatttgtcaaatatatcgggcggtgtcgcggcaattatagtaacgggctggtcggcaaatgcttcgatgagtttgccaaaaaaatcttttcggatatccactaataaagtacccaatgacacaaatattttgggtgttgtgctggctgttaatcgttcccagtcaaaaggactattatttggacggccttttaccggacctacaaatttcatgtgtgagggtaccgtttcaaaaccggcaaatgattgcgaggtgaacaccagatttaattggtgtgaatgtatgaagataccctcatcagcgataccgacttctttttgcagctctttgatgagattttgctgccattcaaatattttgggagcacttttctcggtgtcacccataacatccggtggtactggggttgttgttacagaagggatacgatgtttgtgtgcaaataaagcgccgccaaaagtgatacagtcattaatgatcacatcaggctgccagtgaccgagtagtgtttctaagcccggcatcatcattttggcaaatggaacataggtttcttccagtgccagtttcatgacttccggccctgagcaagatgggccgtcatcctgtcgttttaatattcgctgaagttcttcctgataaggtaggagatcttcctcaggatagatataagttcctccagttgggatatgttcctttgccaatggtgtaataccaaaccatttgacttcatgaccacgagccaataaactggcacccaaacttaatgttggactgatatgtccgaaaaatggcggaacaacaacaagaaatttggccggagatgcagtagattgctgtgcagaaattatggcatgttccagcagatctgctgcagtcttcgttccgcctgcgtctataaaagattggcgaactttgagagcagcttcgcgatattgaggattattcaggatatcatgaacactattttttagatgatttgctttaaatcggttaaaattgagacgttcacctgctccggtacgtacgacacgtcctgcaacatgtgactgatcgtatgcaattggaataacaacgagtggcagaccatgtgaaagggcttctgagaccgtgttgtgtccgccatggcacacgacagcatctaaatgaggtaacaaatccaattgtgggatttgtgcatagaccataaaattttcaggccacagatcaaataaatccggatctgaaaccactacaaccgttagatcttcctcttgaaaggcatcgattaccttttgaaaaaatgcttttttatgctcgtggtcgaatgtggtaccaatgctgactaagatttttttccttggattacttttcaaacgctcccagtcgaaagtgctggaaatacggcgttctgttactaccggacctgtgaattgatagtttgagttgaggtccatttctccaaagaaatattgggaggttaacactaaagtaagaagatcagagcaagccagtgattggttttctttgacaccaagctcttcttgtagcgccaggatctgattgacttcccattcgtgtactttgggtaattcactaataattttgattgctgccggagcggttacggaggtcgcataaggacgattcactttttttgccgcaattgccgccgcaaacaattgatgatcaccaatgactaaatctggttcataggcttccaacagcttaacaattccgttataacaatgtctgtttaaagggatcaacacttcttcgtataaaaacttgatactgtcaatgccgtaaacgaccttttttgaaatgatatccagatagtgttcgctctctcttttttcttcgtcagtctgatcgtattggatgagtaataattgtccgcctgcaggaagtttggactctaagttttggtcaagactgatccatgcaactttatgtcctctttctaacagctcggcaccaatactcaatgtaggattgacatgacctgttaatgggggaacaacaaatacaaatttagccatagttctgtaataaagggttagttaaaaattgaacaatagtttctgctatctgaatgggagcctgaatgggaatattgtgatctccatcgatgagtttcagctcggctgtaccgatttgagattctaaccattctcccgtcggtttacagtcagaagctgatccatagagtaacagagtgggtatgcgtaattcggaaataaggatctgatacagaaaatctttttccttaaccatatctgctttgatactggtctgatggaataaaaactcgtataaccgatggtttttttcgaattgtctttttcccattttcacttttgtggtatccgtaaaattggcgatgtaatgttcgagaaattccttactgtaggcttcgataatacctcgtgccttttcatcttgcggatccggtgcttcgatgacaaccaattgctctacacgttcaggggctatcaaagcagtttggagtgcaataagtccgccaaagctataaccaacaagttgtgcttttttgatttggaggttatccatcattgcgattaaatcagaggacatattttctaaatcatatccttctaaggtacgctcacttctgccatgactttttaaatcgtacatgaccacgtgaaagtgctgtgccaaaatgggagcaatgttaaaataataaatagaaagattactaaacataccgtggatcagtaccacggtatcttcagcacctttattgagttcctgtacgtgaacttttttattattaatagtgattattggcattcgtagatataattaatgatcttattcagatcaagattgatcagttcatccaagtccatagcagacagccagcccgtgaaatcgatctgatcgccaaaatgtgctttgattttttctgaaaaggatacaatttctatactgtccatttccaggtctttggtaaatgaactttgcggagtgatatccatttcttctacaaattcttcaccaataatttctgtaataaaaccttttaaaaggttgaataactcctcatgatttctttttaatgtcgtgtctaaagtgtccatccgataatataatttaggtatttgattgttttaatttcaatttgatcgatccacagatgatcgccttgtatgcaggttacttcgtgtctttttgggttacctttcagccccgttcccaataattttccataagcttctttggctacccaaaatcgggtggtccattcggcctgatctcgttcttctaataaggctaattctgtgtcggtgaataccaattgataaaattcaggactgcgttcggcaatgatttccatgtcaatacccaccggtttatcgtgccgcgcaatggctacggcatcttttcctttatgtgccagtgagatctgaatctgttctgtagcattacctttgagatgaggtttacctgctttatcagaataaatctcaaaggtgataggataactgggttgctttttcttttcgctcagcacctgtcgtacagcatcttttacggctacacggctcaccatccaattttttctgcggttgggcaggagctcctgatagtattgtttttctctttgattgaaataacgtttcagtataaaatcccaggaacttacgcgtgagtaggcctgatgaaagaaaaagacttgtggggcaatttcttccgacaaacggttatggagcggagacatggaaacattccataaagcttcgtcaatttctaatctccggttttgccatccttttatcgcgcaccaaacttttccgtctctttgtagtataatgtcggcgatagcaaattcatcgtttaattcagtcagtatacaggtacactcaaatacaccgtcctgatcgtgcatatcttcgaagaattcaatttgtttgattttgaccggaaaagcaatgcggtctttggttaaggtaagttgcagccataatccaaataattgtccggcattatccaataaggaacctttaccgccattaccttttatttgtcctgtaatgcctttctttccaacagctgataccactgtgataccctgatatttttctccatggaacatgtgtttttcatagatttccaaaggagttcgttcaataggcaatcgttcgcctatagacagatcaaaagtaggttgtggcggatgtgatgctgctaaagatacttctgcattggcaaaattctctatatccagataggcgtgatggttggagcgccagacgccttttattgttttttcaaaaggcttggcaacgttcatccattgaaatacactaacattcatgatcttgtgaatgctggtttccggctgttctgcttgcgctgcttctgccagtaattcaaaaatcatggtcattggaatcacgggttccatatctgccacatccgaccagcctttgggttgtcgtaaaaggctgtgatcaatcagataaggatgcgtatctaaattgacgtgtagtgttttggtaaaaggactgtcgatcagttgtttttttgttaaaacaggtgttaaaacagcggcttctccctgattttgaaagacgtccagtacttcttcctgcattcggatcatatcggcgatattttcctgaaaagcacggaccaatgggtgacttacttttgcttccgttagaacttttttgggctgtacggtatggatcgattttcgtaagttttgcaggggttcaaaatcgcgaataataggtgatcctaattgtaattttatgccttttttagggactatttttctgtgattttggatgtttaaaaaatcgagcgccagtacttttccttctacaaataatgccgctactacccgttgcagctgagcaagtgctgttcgattggctacacttgaggcaagggtactgaaggggctgccttttaacgtatcatcaataaaaccgattaatcctcctgtacctacctgaataaaaaaacggactccttcgtcataaagtttttcggttagttcccgaaatcttactggctgcaccaaatgttcggcgcttaatttacggatagattgctgatctgccggataaggcaggagggtagtggctgaccacaacggaatttttgttttttggaattgaactttttccataccggctaagatcacatccagtttatctgccacaaatggagaatggaaaccggattgaaacggtaaaacctggtggaatatctgttttgattttaataaaggagttaattcctgaagtgccgcatttgtaccacacaggatgacctgatgtggacaattatcattggaaacataaaggttaggaatttgttcaatcaatggttttacctcttcaagacctgctccgatagcaatgaattttgaatcttttagttcaaatgttttcggatcaagaacatcgataagatccttgacagaactggcttcggccaaatctgaagcatatcctgccaaccattctcctaaactatgtccggcattcatatccggatagattcccaatttttttaaggaactgtccagtataccacaattgttaaaaatacctaatgcgtcgttcagcagtccttctccggctgtttctataggcgccgtcaatccaaaatatcgactgacggtttcaacttcgcctttttctaaaccgtctaatcccgggaatacaaaagctagtttaccgccattttgtaaaaggggagcagaggtgtaccaaatatcttgtttattgcgccaggcattatttttggaaacaattttgattgctttttggatacgctcgggtgttggatcaaagagtgcaatgcgataatctccatttcctacggaggtatcgttatcctgaagcgctgaaagcagtgcttcacgggttgctctggcaagtaccagtacttcgtcttttttagggatgtcatacccttctaaaactacatgggcgttgattcctccaaatccaaatgcatttactgctgcgattttgggcaaaccggtttgtgaccagttctgagcttcctgaatcggtgtaaatcgggtgtcttgtatagaggcagttgggttttcacaatataaggtaggtggtaatatgtcgtgatgcagggccagacaggtcttgatcaaacccgctattccggcagctggcatggcgtgccctatattggatttgactgatcctataccggcgcgtgcagcggtttcttctttaccaaaaaattgagccagagtttgcagttctgttttatctcctaaaggagttccggtgccatgagcttccagataaccaatttgttctttatctaaattggcctgtgtccacgcttgttccaatgcttttaactggccttttacagaagggctcatcacgcttgttccattgccatcactgctgataccaactcctttaataacggcataaattttatcctgatcgtgtacggcgtcttccaatcgttttaggacaacgaaaccacagccttctccaatgagcaatccgtctgcatcttcgctaaagggcttgattttctgttgctgtgataatgctcccaattgactgaatatgctccaaaatgcagcattttgaccggtatgaactcctccggcaatcatcatatcgcttcggccacgctgcaactcttgtacggcatggtctacggctacaagagcacttgcacaggccgcatcaacggtgaaagcaacgcctccaagattgaatcggttggatactaatgaggcaacaaggttggggattaaacccatggcggtatctgcagaaaaccgccctttacgttcctgaaaggcctgttttattttttcaatatcggaagaagatacctccggcaatagttcttgcaaaattgagaatatctgttcgccagtacgtacaatttcaatggcgcgtgtagctcctggacctgtataattcccttttccgatgacaattccggttcgttccaatgaaactttttttcggaatacacccgcgtcttctaatgctttttgaacgagttcaagtgttaataggtggtcgggttcagtgccttctacggcaagaggtaaaataccaaatgctgtagcgtcgaattcataatcaggaataaacccgccacgattacaataaaagcggtccgtagcgtccttgctgccgttaaagtgaacaggatcgattcgatctgccggaacaacttgcgtggagtcgactttattgatgatattctgccagaattcctctgcgttttttgcaccaggaaacaggcaggataaacctacaatagcaatatctgtttttttcataatagaggagtacgacggttattaccaatttttaccggacataattaatacctgactttctgttccgtatttgatttcgttcagaaagtgttcttttccttcctctaatgggatcagcgaaattccgcggcgttcgtactcattttccaaggatgaggaaaccattcctgcacctttccatggcccccagttgatcgaaagtacttttcctttcaatcttttgtttaagaccctggcataatcatccaatacactattggctgcggcataatccgtttgtcctttgttgccatagacggaagcgatgcttgaaaataaaactacaaattggcaatctgaacgcaattgttcggctagcacacgtaagggttttacttttgtatcaaagacacgttcaaaagaactggtggttttctgcctgaaaagtttgtcttccaaaagacctgcgccatgaatgacaccgtccaattgtccatattgtttataaatatcatgaataagctgagttaacccctcttcatcgcaaacatctaaggattgatagactactttatttcccaattgttccatgtgtcgaatggtgcgcagaatttgattgtttttgaaaattcgcagcgtctctttttcaatttctgatggagcactgaaattaccggtcttgatgaagtagcttctgatttcttctttcgattccattaattctaatgcttttgaatcggtaataacttctctcgggtctgctgatctgcccacaagaacataggtacatggataagctgccgacatgtgtttgaccagctcagcagtaataccttgtccgcctccgaggactaaaacaaccgatttttgatccaattggatatgtgcctcgtcaagagtcgttaacaaaggtgaaggtatgatgtcgactttatggcgttgattgtttttgtaaatcacttcaacggattggtctgctgtcaggatctcacgtaaggcaatttctgctatttgatttgtttcctgtgctgtatggagactgattagcctgaagttagtttgttcaaactcacgggctaaacttttgaataatccaggataaccctgataatgacgtagtgcacgggtgtcttttaattcttcaacatgtgccgggatatctgtgatcaaataaatccattgtgctttttcaagatccatcttcttaataagaccaacgtggtcgatgatactatgcttcacagtagcggagtatatatcggtaataatcaatccatcaaagagcgttagattttgttcgttatgaaccaactcggtaattgcaccgtattgttccaatatggttttaatggccaatgtttgtgttccattgtccggaactattgcaaatcgttttcctttaaggatttcggtgttttgtgcttcggaaataagggtgggtactaaatcaaaccgaaggcgtgtcaataaactttgcacaggttcagttgtgctcatttcacttatccaggcggctaaaccatttaacgtttttatggcggctaatttttccataagatcatcagcctgctccttgtcatcaccaaatccgattttatttttaagatcgctgatgatttccattcgtttaatagaatctatacttaaatcggcttccagatccagatccagtcccagcatttctttcggataaccggtcttttcactaacaatatctaaaatagccgtttgcagttctgcaagtgtcacggtggttttatctgctgctacaggtgctgcaggtgatgattcaatttttgttgtaactgaaccaacagtacctgtgtattccgtaagccagcttacaagtccgtttaaagtctttattgccgccagttgttccatcactgtatcttcattttcatgatcactgttgagtatgccaagctcattgcggagcacgccgataatttcaactcttttgatagaatcaatgctgaggtcagcttccagatccatttccattcctaacatttcctgcggatagcccgttttttcgcataccacagttaacaacaaagatttgatatctcttgaaggtacctgtaatgttactttagctatcggtttatcgtttgtaattacggttgcggccagtggattagtggtcttattttctactgtcgcggcataaacggggatagggtttagctgttgctgttgtcctaagaaggaaagcatgacatcgcgctgcgcctggatcaacattttcatactgtttaaatattcctgtagtaggtgttctggggcaggttgtgtatttggtgtctggatgattttggagtttgtcatttgaatgggagttacgattggtaatgcaccatgagcaggtaatgtacctgtggttggatgagcggcttgtccatttacacgccaaatcgttgggctcttttgataaagatctggttgatcgatttggattaaattcgcatgtctgtcttcaaaaagtttatttagattaaaggtgcggccagttccaaggtattgtgccaacatacaaaggagatgggtgagactgttatgattgttatcctcaacatgtaggatcagttcctcttgattgaggcaggcctttgttagtcctgttaatatttttccgggacctacttcaataaatatccttgctccatcggcatacatggcctggatttcgtcaacaaaatgcacgggttgcaccaggtgatcggttaactgtgctttaatgtcagataccgcgcttgggtataaggctgctgtggtgttggaccaaaccggaatctgcatttcctgaaaaggaatttctttcagaacagtggcatacaaatctttggatttgctcaccaaaggactgtgaaaagcacaggcaacttccagttttttggctgagatgcgctcgtttttaagtgcctccatgaatttgtcaatagctgcggtacttccggcaacaacgcattgagttggtgaattgtaattgacagcatagcagtcctgatgttgatccagaattgttttcaaacgatctgcatccaggtttaccgcgaccatagttccgggatcactatcagtaatggcgtctagaatagattgtgcccgtttgctgctgagttcaaccaactgttgttcgttaaatacaccggcaaaacataaagccggtaactctccatagctatgtcctgctaacatatcaggtacaataccgaatgactgtaacaactgagctaaggcaagatctacaatacctaaaagaggttgtgcgagacgtgtatccttaatggtttctttttgtttttttaaggatgcggtatcaaatgtggctgcagggaagaccactttttctaaatcaggatattgtgatatgatttttcgcagggctggaaacagtacgaacagatctcgtgccatatgaatgttttggctgccttgtccgggaaacaaaaatgcagttttaccggctcgtttgttgaccataaaaatatctttactttcaatgcctgttaacaagagttcgattttcatcaccagatcttcggctgtatctgcaacaatgctcagctgaatcggtttctctgaacccacggctaagctgtaggcaatgtcttttaaagataaactatcattgatttccaataaagtttttacctgttccaattgaattttggcggcatcataattatcccctcggaagacgaataattcggagggccagtattgtagaatggcggcttcttctttttgtggatgattttcgattaccatatgaaaattggtaccaccaaaaccgaaggcactaatccctgcataacgttctttttcggaccataatcctgtttttgcatgaaaagcaaaaggacttgtgtgggcatcgaagtaggcattgggctgttgaagatgaagggtaggaggttttactccgtggtatacagacatagtggctttgataagtccggccagaccggcagcacatttggtatgcccaatttgagtttttacagaaccaagatgggtttgagatggtaaagccccggattttagaaatagattggtgagtgctgtaagctccgttttatctccgactactgttccggtaccatgcgcttcaactaaaccaactgtagcggcactgatacctgcctgatcataggcacgttccaatgcgcgtacctgaccgatttttcgcggtgcggtaagaccaagagctttaccgtcgctcgatcctccgacacctttaataaccgaataaatacggtcaccatcacgcagggcatcttcatatcgttttaagactaaaatagcgaccccttcgcctagcgcaataccgtcggctgcactgtcaaatgttgcgcagcgtcctttgcgggagagggcatgtgtgctggaaaacatcagataatcgttgataccgttatgcaaatctgctcctccggtaagtaccatatccgatttgcccaggatcaattcctgacatgccagatcaatagccgctattgatgaagcacaggcagcatcaacggtaaaatttcgtcctccaagatccagacggttggtgattctgccggcaattacattggccaatatacccggaaatgaatcctccgtggtttgtggaaatgctttttctacttcttcgtgaagctctccaaaaacctgtttgtaataacctctgaaactgtagctgttggcaagatcgtttccaccttcagcaccaattataaccgatatattttctctgttgatttgtttttcaccataacccgcatcttccattgcacgtttggcaacgagtaaagttaaaagctgcgttggctctatcgctgcaagagattgtggcggaataccaaattctagcgggtcaaaatctatttttggaataaaaccgccccattttgaatgtgacacatccgaaccattagaatcaggctgataatagaggtctttattccatcgttcctccggtacttccgtaacacagtcttttccaagaatgatattgcgccagtattctgctaaatttttggcacccgggaacacgcattccatccctataatagcgatgtccagtgctttttcggctgatgaaggtttttccggcagttcggcctgttcaatgtatttttgattttcgatagcaacgttatgatggagtgattccagtgtaatcacctgattgtgcatggtagcgacctgcccaatcatatacatgcctaaatcaagttgttggtttttaggtatcgttacgagtgcatcaccttgacggtcaatgccttttgcggcaattcggagacgtcctacattcagtttttcaagctgttcccaaatttgctttttgtccgttccaagggctagtaactttttcttttcattgtcgaaatgtagagcgaatgccgtatttaaacaacgtgtttcatgacccggtgccgtttccagcaagacggtatctttggctttcattgcttgctgctgaaattcttgctgaatagctcctgtactcactgcttcttgtgtatacaaataggctgttcccattaatacaccgaccttaacccctcgggctgcgagagtggcggtcataatagatacaaaggctgtggaaaaagcatcatgaattccgccggcaaaaaatacacttatattttccggatgatcttcttttaaaatacgttcaatttgtttttcccaaagtactgtgctggagagcggaccaacatgtccaccacattcccgaccttcaaacacgaagtttttggcaccttcttttaggaaaatatccaatagcgcaggcgaaggtacatgtaaaaacgtggttataccggctttttcaaatactttagcttgtgcaggccgacctcctgcgatcaatactacgggaggtttggcttcaaggatataggcggtttgttcttctcgtaattcttgtggcgcaaaacctaatatccctacaccccaggttttatcgccggccagtttttgagtttcgatcactaatgctcttgcttgttctcctttgagtaaagaaagagctataaaaggtaaagctcctgtttcggctactgcattggcaaatgccggaacatcacttacgcgggtcatcggtccctgggcgatcgggtagcgtagaccaagttgtttggctaatggattattttcgttaataattgcagatgctttcgcttgtttaagatgaccgtatagggcttcatgaaatccaaaaatcaatttttttaacgttttgaaattttcatacagctctgtagctaaagcaatgtcttgtcccatcgggatgtaacttttctcaggatcgaggtcattaaagtattgccctaactcttcgatagaaacattttcagataaaacaggcgaattgggcctaaccaatacgcgatgctgggcgatgattttggtttcggttccatttaatttcgaacatagatttttgaggtcttgtggaatggtactttcgggatataatgccaattgactgtctaatacaataccttttgccccaagtgcttttacagcagcagcggtatgaagacctattcctccttgtacccataccggtatggtcttgattttttgtatgacacgctgaaagagaacaaatgtagattcataaccaactaatcctgcagcttcgtttcctttcacaataattccaacagctcccagttgttcggcttctctggcttgttcaaggctcgttacctgataaattcgtgatacgttaggatagatttctactgagattccaaatggaaggatcgcaaggcttacctgctcgggcagttgaagggatcttagcctgtcactggtaagatatataccgtaggaaggtatactgttcccgtcaagttgatgtaatgcttcctgagcgatttcgatatcatgtcctaaacttaatacggggaatgctccggcctgaaataattgagacattaggttgacgtctggcttttcaaaaggcgttaatcctataatagtagaatttttcataggttgataagattgaaatgagatttggaaatggtgtaactttaataatgacctttgtggtactatagtagttatcgtggtatagtggaataatcgttacaccagccttcgacttcgctcacaattccagtgtgttattgtgaaatattataacttattacaaagtttttcggacttgttacatggatttaaaattagcggtaaatttacttttgcactacagtaggagtgttgatatttgcagcaataaatcaaaaaaacgagttatgaataatcttaaaaactccttgttttacattacggttattggcggttttacaggcctgatctattgggtaatttcaaaaggggtttcacttgaggccggacgcggagtcgttcataaaaaaatagaaagcaaccattggaatgatttccttcactcgatgatagaaaaccttcagcatcctttggctattttattagcacagatcgtgactattattttagtagcccgtttgttcgggtggttttttagaaaaataggacagccttccgtaattggagaaatgattgccggaattgttttaggaccttctttggtcggaatgtattttcctgaattttctgccgctttatttccaaaagaatctttagggaatctgcaatttttaagtcaaattggtttgattcttttcatgtttgtgattggaatggaattggatttgaaagttttgaaaaacaaagcacatgatgctgtagttataagtcacgcaagtattgtaatcccttttgccctggggctttcattagcttattttatctaccatacttttgctccggttggggtggagtttgcctctttcggactgtttatgggaattgcgatgagtattaccgcattcccggttcttgcgcgtattgtgcaggagcgcgggatgcaaaaaacaaaactcggaactatagccattacgtgtgctgctgccgatgatattacggcatggtgtattttggcagtggtaattgctattgtaaaagcaggttcgtttacaagtgctttatatgtaattggtttagcattattgtatgtaattgtcatgttgaaaatagttcgtccgtttttaaaacgtgtaggtgatttgaattcaacacgtgagagtttgaataaacctgtcgttgccatcttttttctaaccttgttattctctgcatatgctgccgaacttattggaattcacgctttgttcggcgcttttttagccggagcaattatgcctgaaaacaatactttcagaaatatttttattgagaaagtagaagatgtcgcgatcatcgttttactgccattgttctttgtgtttaccggtttacgtacacagattggtttattgaacgatccgtatttatggaaggtaactgccgtaattattggggtagccgtagctggaaagttcttcggaagtgcctttgcagcgaaatttgtcggacaaagctggaaagacagtttagcgatcggagctttaatgaatactcgtggtttgatggaacttgtagtgctaaacattggttacgacttaggagttttgtcaacagaaatttttaccatgatggtcattatggctttggtaactacgtttatgaccggcccggcactggatttaatagattttatatttaaagataaggtaaccgccattccgcaggaaatagggaataaaagcaagtataaaatcctgctttctttcgccacgcctgaaaaaggaaaaaaattgcttaaactggccaatagtctggtgaagaaacaagccgataattcgattgtgacagccatgcatttgtcgttaagtaccgaaatacattcgtttgatatcaaagaccatgagcgtaaaatgttgttgccggtggtcgaagaatcagaacgtctgaatcagaatatggttagcgtttttaaagtaacaaatgatattgatactgatattattgataccgcaaatcagggagaatatgatttattattagtcggattgggacagtctatttttgaaggaaccttgttggggaaaattcttggatttacgacgagaatcgtaaacccggaccgcttaatcgataagtttaccggaaaagaagggttgtttgaaaattctccttttgacgaaagaacacgtcatattattgcgaaaagcaaaatgccggtaggaatctttattgataaaaacctggaagaaatcaatcaggtttttatgccggtttttagtaaggaagatgctttcttaattgattatgccaaaaagttaatcaacaacaacgggtctcagattaccgttttggatgccagtggagaagtaaaaagtaccagagatattcaggaaacgattcgttctatcgaacagattgcgccgaatcacattatgatcatgcacgaccgaacgattaagaaagaattcttggagaaccagaacttaatgattatcagtttagacagctggaagaaattaatagaatctcagagtacctggttgaacaatacaccttcggtattgattttaaaaccatagaggaattaaattctaaatttcaaatcccaaattccaattttgttggagtttgggattttttgttttcttatttctttgaggtttctctttctgttgaaacgaaactaaatcttcaattggaatttaagagattggaatttagattgtgttatggcacgcggatgacacagattcgctttgcgaaaacacagatttacacggattttgttatgcttactcctttcgtcgtaacgaaacgaaacgtcacattggaatttggaattcaaaagaattgggatttaatatttatagtcccaaatctaaaacataagaaattttaacggcaatgttatcctcaaatttcattaactggttcgggccatatcgataaaagccgccgaaaccgatgcccttgtaaattttgtttagttcgattccagattcaaaaaagcccctgtctaaagttttatagattggacctacatgctgttgcggattttccatatttccccatgccattctcgttaccagcactaaagaaggacgcacttttttgaggattctgattcggtcaaaaccatgtttaagttgaaagaagacatattgactggagaaaaactcattaaaaaacatcgtttcaaaactgtttcgtccggcaaaggtaatacgctggataatggtttcttttgttaagttgttgggcatggtattgtaaagatgggtaatgggaacatcgcccgtagcataacctccctgcagaagcaaactcgttttttgaccgtttaagtatttcttctcatattcagctttgaaatctattttcccaaaagtaaaatcattttccaatacattaggtaatgattgtgtgtactgaaaagtaaaccttggaaatcttttatccgtttcagttctcccggttggagtttgcataaaagcactaaaaggagcccatacgatcgaaaccattgctgtagtcataataaaatccgaatacagttttccattgtaattaaaaagataatcaaatttgggctcgacataagttctcgaaaattctagtacggcttccgttttaggaataatcttggtctgaatattagctttccagcccacatattgataaaaagtactaatgttgatcggacgtggatcgtaaattttgaaaacacgtttgtcaacggcaaaaacggtactcgcaatttcccgaacatcatcggtataatatccgtttacccaagtattggtgtttttgtccaataaaaatcctgctcccagactgtatttgtgctgaccgtcttttgtaccgtaagccgagtatccctcgattctgaagtttttagaaaaacggtcattggtaataccgccaagccccagtctgaagccttcgtaattgttgtaactgataatcttttttaaatccagatcaataggtccaatcgggaaatagccattgataatttttcgtccaagtcccaaacgattctcgattcttttctttatcgaaagactgtcaattaactgataggttctctggctttttaggtccagatcttcttttctgtattcttcccagaaggtttccggttttttgttggcatcgtctttaatttcaatgtaaagtgccggatcttttataggggcagtagtattatagtgaatgtcaaaattgttactttcagaaagcagataagtaaaatcggaagccgatttttttcggggttcaaaattatcttcaacatctccgtcaaactgaattgttccacctaagattttaatatcatcgtcgtttttccctttaacaattttaaaagtggtgttgctctgaaaccatattttctcactgggtacgtattcaaattcatgaatcccactaatgtccaggacccctttgatacgcattaccgctttagcgatggcaaaattctcctgatcgatatataaaactccttctaaaccggatgattttcttctttgtttgtttttaaagtaaatcatatacgtttcacgtccttttatagttaccgtgtccagaatcttgtaattgtaactttgaggagcactattcgaaattggattttcgtacttcgtttcaaacaattcgtatttcggatcataaatcgaaatcgattggagattaaaagcaataacctcataaataggttgtttaaacccggacattttggttcctagtatcgtttctttcagtttgttgttgccgaactggtattgtgaaactttctcggtttgaaacaagtgctgcttgctaattatttctttgaatttataatccgaagaatcaatgttaatgcgctttttgtcgaaatttttatatgtggcggtagagtcaattctgccgtcaatagaatcaggattcgctgttacaataagtttgttgtagcttttgtattcgaaactgttcagttttttttgcggattgtttttgtttttattcgcaatgaccttcttaattatcgtaagggccggattttcgtttgaaaccacaacctccttcaaatcgtcggttttttgaaaaagagaaacagggtaaaaagttttttggtccgtaattacaattgtcttcgtttgaaaaccaatgtacgaaacggtaaaagtttccggttttgaaagagcttttagaataaacttcccgtcaacatccgtaattgtattagtactgtcagaagttgtaatggtagcaaaaggaagcggtttgttattagagtccgttacaattccgtttatttgaaattgtgcctgaatggtaagcgtgaaaaacaaagtcaacaaacagaatagcttcatagagaatgttatagtttcaaaacggacaacttgtacttttggtatgcaaaaataacaataaaaaaatccgttcagtataatttaactaaacggatttttattttgtgttgaataggattacaccttcatgatttcggcttctttagcagccagtaattcatcgatttttttgatgtaagtattggttaagttctgaacttgctcctcagctgatttgcaaatgtcttcagaagttccttctttttctagttttttgatatccgtattggcatctttacgtacgttacgaacaccaattttagcatcttctgcttcagctttcgcttgtttagccagttctttacgacgttcctctgtcaaaggcggaacgctaatgataataacgtctccgttgttcattgggttgaaaccaatgttggcaaccatgattgctttttcaattacagacagcatgtttttttcaaaaggctgtaatgtaattgttctggcatcaggaacactgatttttgacacttgagaaaggggtgttgcagctccgtagtaatctacaaaaacacttcccaacattgccggagaagcttttcctgcacgaatgttaagaaattctttctctaagtgcgcaatcgaaccgttcatagattcttccgtactgtctaatataaattctatttcttccgtcattttttttagatttttagattttagaggattgggttttcaagttttaacgaaaatactcctctaatttactaactaatatatttcttttttttgattttaagatggctggatttttagattattggaaactctccaaaaaaacggcattcaaaactttaatcaacctgtgttttttgacaaattagaactattacaacttctaaaaatcgaataatccaacgatcgaacaatctaagtagtctaaatgttaactactgttccaacgttttcaccttcacagattttcaaaagattaccaattttgttcatgtcaaaaacaacgattggcaatttgttctcctgacttaaagtaaaagcggtagtatccatcacgtttagtccttttttaagaacatcatcaaacgaaataaaatcaaattttactgccgatgcatttttttccggatcagaatcatagacaccatctacacgagttccttttaagatcacatctgcattgatttcaattcctcttaaaacggccgctgtatccgttgtaaaataaggatttccggttccggcaccaaaaattacaattcttcctttttcaagatggcggtctgctcttcttttaatgtaaggttctgcaatagactccattttcaaagcagtctgtaaacgcgttttcattcctttgtcttcaagtgccccctgcaaagccattccattaattacggtagcaagcatacccatataatcgccttgtactctatccataccggcacttgcacctgcaacgcctctaaaaatatttcctcctccaattacaatagcaatttctactcctttactgtgaatttgcttaatctcttcagcatattcggctaatcttttagggtcaataccgtattgtaaatcacccattaaggcttcgccgctaagttttagaagaattcttttatatttcatttctgtgttgcgttaatttgtgcaaatatagacatattctgatttttagaaataatgttttaaaaaaaataatagttcttctcgttttaaatttttaccgttttttcggatttctccgaatgtgacaaaagtcattctttaagtccttttaaaagttgtaattttatagaattcaaaaaatcctaaatatgaaaagtaccatagctaaatcattattcaatagtcattcgtatacagaatatcgaaaaatagttaccgatttattactggaagggaaatcaacaggcaatgaacaatccgaaagcttaaccaattacagtaagctgaatgaggccaggatgaaccgactggagaaaaccatgaaagtttcggatgaggtagtttccgaattagaaagcttaaagcacaattatatctggctggtgatttctgaaggctggtgtggtgatgcagcacaaatacttccgattattaataagatggctttggcttcgcataaaaagatagatctccgaatcgtttttcgtgatgagaatgagcctctgatgaatcaatacctgaccaatggcgggagggcgattcctaaagtgattgtgatttgtaaagaaaccggaatagcccgcgctgactggggacctaggccaaaaggagctactgaattaatggcaaactataaaaaagagtttggcgtaattgatgaaaaaatcaaaactgatttgcaattatggtatttggccgacaaagggttgagtactcaaaatgaacttatggatatcatgcatgtgctggaaattagggagtaatatgaatgattttgagcaaaacggatatgtgtttctggagaatttcttttcggaaaatgaactggcagctattgaaaaagtactcgttaaattccacaaaatctggttgcgtgatcatgagataagttatgaaaaaggggctttaaacagtcatagtctgaccaggggagattgcttaaaggaggaagaaaaaatacgtctttttgaatttatgactcaagccaaatttgaagaaatacgaagcgttatctttcctaagcctcctgtttttttgaatacccagcttttttttgatccaaaagatgaatcccagaagaattattggcatcgtgacatacaatatacaggaatgtctgttgaagatcaaaagaaggccatcaaaactcaaaatgtagttcacttcaggattcccctgaaaagtgaacgaggaattgaattgattccaaaaacacatcgcgaatgggatttgccggaagagtttgaggttagaaattctttgaacggccgtcttcaaagtgacgatttaaaacgcggagaaattgtaagattgaatcggggagatttactgattttttctgccaatatgattcatcgtggtatttatggaaaggatagattttctctggatatcattttttgcgataatattcctgtaatgagaacttttattgataaggataatttgccatcagcaaaaatattggagaagcttataaacaagcagctttttgatatttagtacgtcgataatggtgagtaagactgttgagatagattccttaagtttttaagaaataaatcgttaaacagccttgtttttcaggtattctgctgtaaataagaattttagtaataaataatatgctaaaaatatttgtattgcttcaattttttgtaacttgcaggagtcatcccacttctattattcattttcttatttactctttttattggtgtttatttaatgtttaacaactaaaaattacactatcatgaaaaagttattcgaaagattttacgattttgtttcgggcttgttgtttggaggaaagagtatatctcattactaacttcaaaaaacagagcttatgaaatagaactactttgtaagaagtcggcacattgctatggggattcctgaagtaatgtgctttttgtttttgaattcagcagatttggactttgagaccaagaaaaataatcaagactctttttgtatatgttgaatttattgatcaatatgtaatctgtgctgtaaaaaataatgaaaaatagcatctgacaagagatttagaatatagcttagaatcttcaccatgtaaggttactcaaacaggttgctctgaaagagctccagacatagcatagtgctttgcattatgaatgaagataatgattatttgtgccctgtaagggcaaaagactacagacaaagaaaagtactcacattatgttttctgagaaaagcaattgatctacaggttcttttgtttgcttttgccctttcagggcattactcattgttaaatctattttttatagtgcgttgcaccatactgatgcttttaggctttcagccttttttataaaatagttttgaaattctttgtcctttcagggcgttacttattgttaaatctattttttatagtgccgttgcaccatactgatgcttttaggctttcagccttttttataaaatagtttaaaattttactccgcagttttaaaatcgattaaaaaaggttttagtctcactccgttttgttttctgaaattatccgaaattaaaatttggtaatgttggccgggttttaaatctgctttaatagtccaagatttcatatcggcagaccagattctgttggtgtctatttttgggaaaaagctttctccaagagggccaaaatcaatacctgtactgcgcccgtttaacggttccgaaaaagtaatcgtgatttcagtttctcccgattttactttttgacttccgtttttaaatgcagagatagatacaacgtgaggtctttgcttttcgtaattctgacgtaatttttttagattttgcggaaacaatttggtgccatcgactatgcgtgccacttctttttcattatggtaatctagttcaattaaggtctttatcgctttcgtcttgtctttggatgaattgtagtaacgttcgcagatttcataacctatataatatcccaaatctctaacttttaaaagatttctgttttctccccagatccagttgtaattgttgcttttgatgtacaaatctgcgatgaactgatcgattacttttggctgattgcttttcccgaattcaatggcaggagaacttgattttttatcggttactttacaggaaataaattcggcgacaccttcgtaaaggcacatcaaaagcaaatcttcgaccagttctttttgctgagtatgcacatattcatgcgtgcagagcaatgcaatgttttttctcggctcgtattctttgtaaaagggttgtctccaggctgggagttcatcaataatagtagtttcatctgcgagactcagttcgcttccaattaaaacccgatcttcctgaatggttccatttgttcgaaatgcaccaatagaaaaataaatagtagatggttttaaatcgggataagcttgttttagtttactgatgtcggcatcaatttccggataaagtccggcggaatttaaagtgtttggttttaatgaactccagaatttaggatatttatttatggcattgatgtagtctttggcagtataatttcgaacctcaagcaagctttttaagcccggagtagcttggtctaagtatagttcttttagaaaagaatattgtttgatgctgtctttttcggcgacaattttatcgtaagccttccagaaattatcaatatcagtggaaaccattttttgattaatggtttgactgtttgatgagattgtgaagacaaacaagagtagtagaaagtggtttttcatgttttggtttttaatcttgtgactaaagtacaaaaaagaaaaagatacaatcttgcttaaaggggcttgaaaaatatattatgctttattcctgctgcagactttcttcaaaaagtgtaatgtcaatagcattttttacatcgtaatcgccaattttagttcggcgtaaaaccgttaaatgcgatccggaattcatcgcttttccaaaatcaaaagccagagaacgaatataagtccctttactgcacaccactctaaaatctacctcaggtaaagcgattcgggtaatttcgaattcatgaatggttgtttttctgctggcaatttctactgtttctcctgcacgcgcatgctcgtacaagcgaacaccgtcttttttgatggcagaaaaaataggtggtttctggtctatttcgcccaaaaattgtttcaccgtttcatgaattagtgtttcgtcaatatgatcggttggaaaagtctgatcgatttcggtttctagatcgtaagatggagtagtagctccaatataaaaagttccggtatattcttttgcctgaccctgtagttcagaaattcttttggtaaactttccggtacagattagcaatagaccggttgccaaaggatctaaagttccggcatggccaattttgaactttttaggaagtccggctttattgattaaaagatattttaatttgttgacagcttgaaacgaactccattttaaaggtttgtcaatcaataaaacctgtccgtttagatattcttcaggagtcattatataatcgtaagaggatgaatgaaaaagtgaatcagtaacagaacgattcctgcaataattcggtaataaccaaaaactttaaaaccgtttttagtcaaaaatccaataaaggatttaatagctaagagcgccacaataaaagcaacaacatttccaattaccagtatgttaatctgatcgtgagacagttcaaatccggctttgtaataatcgtaacatttttttaccgtcgctcctaacatggttggaacagccaaaaagaaagagaattctgctgctgtagtacgggataatttttgagacattccgcctacaatactggctccgcttcttgaaactcccggaatcatagcaatgcactggaataaaccaattttaaaagcttgtaaataggtgatttcagaagagctttcagttgtatttggatggttgaaccactcgtcaacttttagtaaaattaaacctcctatcaaaagagaaacagcaactgtaacagggttttctaataaaccatcgataaaatcacttagcaataaacctaatacgacagccggaataaaggcaaccaaaagtttaaaataaaaatcaagtgtttgaaagaatcgtttgaaatacaaaaccactaccgaaagtatcgcgccaagttgaatgacaatggtgaaaagtttagtgaaatcttcatgagcaattccgaaaaaggaagaggcgataatcatgtgaccggttgaagaaacaggcaaaaattccgtgatgccttcaataatagctagaacgatagcttgtaatgtattcatttattaagattgttagatttttagactcattagacttcttagattttataaaagattatctaaagaatctaaagatctaagaagtctaacgagtcttaataaagtctatttggattttttgaaaatagaataaatcgtgattccaaaaccgattaaaactgtagttggagccaaacgaatacgtctgaaattaaacacatcttcattgaacacattcggatcgttgcttccgcctccagacattaagataaagcctaaggcaataactccaattccgattaatagaattttgtaattaattccgtcaaaaaggaattcttgctttgatgtctgttcttctttattgttgtttttcattttatttcttttgtgccttcgagcgtagcgaaaggctttttaaaaatctgcaatctataatctgcgatctaaaattaatacaaatcgtccgttcttaaatttaggaaacgttgtgtggcaaagtgagtacttacccaggtaatcaaaactcctaatccgaatacggctaataacaccagtccaattaaggctttatcttctaaaatgcccaggcccgggaaattagtttctacatagaacaaaagtccgataagggcaataatagccagaccggcgcctaacattcctaattttacactgcgcattacaaatggcttacggataaacgattttgttgcaccaaccatttgcatcgttttgatgataaaacgattcgaatgaatagataaacgtaacgaactgttgattagtagaacagcaataatcgcaaggaaaccactgataattaaaatccacatacttacttttttgatattatcatttaccagattcaccaattgtttgtcgtaaacaatatcttcaatcatggtgttttgacgtagtttgctttctattttaaggatactgtctctttcaacatactccgcttttaagtgaatgtcgtaagagttcaataacgggttttcacctaagaaagtcaggaaatcttctccgataatgtcagtgtgttcttttgccgctttttcttttgttacataaacgaatgaccttgcaaaaggcgctctttttagttccgtattgaaagcttttatcacgctgtcattagcctcgtttttaaagaaaaccgtcatggcaattttttctttaaaatcattagccagttttttagaattgataatgaataatcccagtactcctagcaggaataaaaccagaaatacacttaatacaaccgaaaaataagaggaaattaacctgcgcttttgaaatttatcaaagttagaactcatagtttgcttaaattatggggtaaaaataataaagaatttctttatatgaagttaataacggccaaagttttaactttcgtacaatataagcaattttagacttgtattttatctcaataaaaatgaagaaattataatttactttttaggaattaaaatactttttgttacaatctgtaataaatgtaaatttgcggcttaattaatttagtgaaaaccttagaaccttagtaacttagaatcttagtcacttagaaatgaaatacaatccaaacgaaatagaagccaaatggcaaaaatattgggccgagaaccaaacttttgcagcaaaaaataattctgaaaaacccaaacattatgtgttggacatgtttccttacccatccggggcgggattacacgtagggcatccactgggatatatcgcttcggatgtttattctcgtttcaaaaggcatcagggtttcaatgttttgcatccaatggggtacgacagttttggattgccggcagaacagtatgcgattcaaaccggacagcgtccggaagataccacacgtgttaatattgatggtggagtagataaagaaggaaaacaaatagcaggatatagaaaacagttggataaaatcgggttctcatttgactgggagcgtgaagtgcgaacgtcaaatccggactattataaacatacacaatggatttttattcagttgtttaattcatggtataacaagaatgttgaccaagcagaagatataacaactttaattgctctttttgaaaaagaaggaaatgcaaatgtaaatgcagtttctgatgataacattggaactttctcggctgaggagtggaatgctttatcgtctgacgaacaggagaaaattcttttacaatacagattgacttatctggcagaaacagaagtaaactggtgtcctggtttaggaacagttttggccaatgacgaaatcgtaaacggtgtttcagaacgtggaggatttcctgtaattcgaaaaaaaatgacccaatggagtatgcgtatttcagcttatgcagagcgcttgcttcaaggtttaaatgaaatcgactggagcgagtctatcaaagaatcacaaagaaactggatcggaaaatcggtaggagcgttagtaaagtttaaagtcaaaagtcaaaagtcgaacgtcgaaagtgaagctgcattttcagactttggacattcgactttggactcttttattgaagtatttaccacccgccccgataccatctttggagtaacttttatgactttggcaccagaacatgatttggtagctaaaattacaactccggaacaaaaagaggcagttgaagcgtatatcgagaaaacagcaaaacgttccgagcgcgagcgtatggctgatgtaaaaaccatttcaggggtatttacaggtgcttatgcggagcatccatttacgaaagaaccaattccggtttggattggggactatgttttggccggatacggaacaggtgctgtaatggcggttccttgcggagatgagagagattatgcttttgcaaatttctttaaaggtcagaacggaatgcaggaaatcaaaaatatttttgccaacgttgatatttctgaggcggcttacggttcgaaagacaatgtggagatcgcaaattctgatttcctaaacggattaaattataaagaagctactcaggccgctattacggccttagaaaaattaggacagggaattggaaaaaccaactaccgtttgcgtgatgcggttttctcccgtcagcgttattggggtgagccattcccggtttattatgtgaatgggcttccaaaaatgattgatacggagcatttgccaattattttacctgaagttgagaaatatttgccaaccgaagacggtttgcctccattaggaaatgctgctgtttgggcttgggacatcacaaataataaagtcgttaataccgacttagtagatcatgcaacgatatttcctttagaattgaataccatgccaggttgggctggaagttcatggtactggatgcgttatatggatgcacacaacgaaaccgagtttgcaagcaaagaagcattagcgtactgggaaagtgttgatttgtatattggaggaagtgagcacgccaccggacacttattgtattcgcgtttctggaataaatttttaaaagacaaaggttttgctccaaccgaagaaccattcaaaaaactgatcaatcagggaatgattttggggactactgcttatgtgtatagattagaaggaacgaacacttttgtgtctaagaataaaatcggagatcagaatgtacaaccgcttcgtgtggatgttaattttgtgaattcttcagatgaattggatgtagaaagatttaaaaactggagagaagattttaattcggcagaatttatttttgacgaaaacggaaaatatatcgttggacgtgaagtcgagaaaatgtcgaaatcgtattacaatgtagtgactccggatgatatttgtaacgaatacggagccgatactttgcgtttgtacgaaatgttcttagggccgttagagcaggcaaaaccttggaatacggctggtatttcgggagtgtttggtttccttaaaaagttatggagattgtactttgatgataatggtttaatcgtaaacaacgacgaaccaacaaaagacaatttaaaatcattgcataaaaccatcaaaaaagcagcagaagacatcgagagtttttctttcaacacttctgtttctcagtttatgatttgtgtgaatgaattgtcttctcaaaattgccattcaagagccattttagaaccgttagccattttagtttcgccttatgcaccgcatattgctgaggaattatggttgcagttaggaaatacaacttcgatttcagaagtttctttcccggtttttgaagcaaaacatttggtagagacgagtaaagaatatccggtttcttttaatggaaaaatgcgttttaccatcgaattgcctttggatttaaccaaggagcagattgaagaaattgtcatgaaggacgaaagaactttacgtcaattagatgggaaaacaccaaataaagtgattattgttccgggtaagattatcaatcttgtagggtaataattttaattttcaatattttaaaattccaaattccaacttttgttggggtttgggatttttttttgtcatttcgagcgaagggagaaatcacactagctaatcgacaaagattatcgatctagtttgcggggttccttgtgtgatttctcgttcctcgaaatgacaagattgtgtagtttttttgttggggtttgggatttttttttgtcatttcgagcgaagggagaaatcacactagctaatcgacaaagattatcgatctagtttgcggggttccttgtgtgatttctcgttcctcgaaatgacaagattgtgtagtttttttgttgggatttgggattttttttgcgtttagtttatcatttcgaccgaagggagaaatcacaccagttaatcgacaaagattgtcgacttagtttgcggagtttcttgcgtgatttcttgttcctcgaaatgacaagattgtgtagtttttttgttggggtttggatttttttttgtcatttcgagcgaagggagaaatcacactagctaatcgacaaagattatcgacttagtttgcggagtttcttgtgtgatttctcgttcctcgaaatgacaagattgtggagtttttttgttagggtttgggactttttttgcgtttagtttgtcatttcgaccgaagggagaaatcacaccagttaatcgacaaagattgtcgacttagtttgcggagtttcttgcgtgatttacttagtcaatcgctatcgctcgagtgtccttcgtcgaaaggatgaaaaagctaggggtgagttttttttgaaacagctccagcggagcaaaatatttatagcaaatgtaattttccggtatcaagaagctccggcggagcggaacataaatatttgaggcagtcccgttttatagttttttgtatggaccagaattgatattgacgtgtgaaaagatatttttttatcaaaaaaacaataattgtttgtggagtgtctgagcccttgtaaagattggggtttaggcctatagatgaaggttggaatttggaatttggagactaatttttattttttttagaacgatttgtaacattttaaaacatctcgtatccaaaaggcgaatttaactaataaaccatttaacaacttaaatctattaaaaatgaaaaagtatatcatcttagttatcgccttattattttcagcagtatgtttaaatgtatttgcacaaacaaaatcatatccgtttgaagttcttaaaaccggaaaaggaaaacaagctgtagtgtttattcccggatttgcatcttcgggagatgtgtggaaggaaaccagagccaatttagaaaaagatcatacctgttatacacttaccatggcgggttttgccggagtaaaaccacagccaaatgccagcttcaaaaattgggaaactgaaattgcagacttcatcaaaacaaataaaattgaaaaaccgatcgtaattggtcacagtatgggtggaggatttgcattggctttggcggcagattatccggaattggttggtaaaattgttgtagtagacgcgcttccgtgtatggctgctctgatggatcctaattttaaatcaaaagaaaataacgactgttcgtcaatggtgaatcagatgacggctatgacggagactcagtttttggacatgcagaaaaaaacaatgccaagactggttcaggatgcctcaaaaatcgatatgattgtagattggagtgtaaaatcagaccgaaaaacatttgctgaaatgtattgtgatttttctaataccgatttaagagagaaaatcgcgcaagtaaaatgtccatcattaattttactggaatcttattttgtaaatttaaaacctgctattgaaggacagtatcaaaatttaaaaaatgctaattttcaatatgccggtaaagggttacactttattatgtatgatgatgcagcgtggtatttaaatcaggtgaataatttcgtaaaatagtactgatggaatttgaagttatctataaaacgtattgggatagaattttcaggctttgtatgggttttgttaacgattatgatattgctcaggatttggctcaggagacttttgttattgtctggcaaaaactggacacttttagaaacgagtcgggcataggaacctggatttttaggatagcttctaataactgtttgcggcaaattgaaaaagaaaagcgttttcttaaatcagatcttccggtgaatttgcaggaagagaaacagcaatcgttagaaccgcaaatccagtttttgtaccagtgtatcgctgaattgcctgaaacggaacgtattattatttcgctcgaacttgaggaggtaaagcaggctgaaattgctaaaattgtggggctttcggaagcaaatacaagagtgaaaattcacaggataaaggaaaaactgactcaaaaatttaaagaaaatggaccaaaataacaatatagatttcaaagatttgtggaaaaaacaatccgtaagtcagcccgatatgaaagatttattggggagattgaaggaatttaaagcagccggccttcgccatctgtggattactaatattttgcttttggcaactactgcgtttattgtttttgtctggtactattatcagccagaatttatttctaccaaaataggaattgtactggtgattatggccatgatcatgtatgttggtgtttataatggattattggtcggttataaaaatatcgataccacacaatccaatcaggagtacctgcagcgattgattctaattcgaaaaaaacagcagtttatgcagtctacgattctgaatttgtacttcattttattgggtatcggaataggtctgtatatgtacgaatacacttcgagaatgacgcttgtttatgcgttgctcgtttatggggtggtattgctttggattggggtgaactggttttacattcgtccgaaacaaattaaaaaacaacaggcaaaaatcaacgatctgattgggaaatttgaagaagtcaataagcagttggagttgtaatggagttttttagtttttgtaaagttgcttaagaagtaccctgacgctaaaatgtcaaaatgacattttttgaatttggttcagaatttgcggtttattctgtaaatttagtaatcaatcaaaaaaaacaaagatatgggaagtggatatttaattcttgccggagcaattatgttgttcagctggatagtgagttcaagactcaagagtaaatttgagcagtattctaaactgcaattaagaaatggaatgagtggtgctgaaatcgccgaaaagatgctggctgatcatggtattagagatgttcgtgttatttcgacacctggtcagttaacagatcactacaatcctgcagataaaactgtaaatttaagcgaggtggtttacaacgaacgcaatgcggctgcggctgcggtggctgcacacgagtgtggtcatgcggtacagcacgctgttggttatgagtggttgacaatgcgttccaaattggtaccgattgtaagtgtcgcatccaattatgtacaatggattttgttagccggaattttaatgatcaaaatctttccggggctattgctgatcggaattattatttttgctgcaacaactttatttacaattattacactgccggtagagtatgatgcaagtaagagagcattggcttggttggaaaataaaaatatgctgacgcagcaagagcaggccggagctaaggatgcgttgaaatgggctgcgagaacttatgttgttgccgctatcggatcaatcgcgaccttgttgtactatatctcggtctattccggaagcagaaggaattaattggtcaatgagataattggtcaatgagattattagataattagccaattagatagttaaaatgaaacccgacagatttttttgaaatccgtcgggttttttcgtgtagaaatatttcgtgatctcattgactaattatctcattctctaattctataattgaatctgcctgtcaatctgctgatccagggagataaatgtttctgttctggaaacgccttctattgcctgaattttggtgtttaaaagctgcattaagtgttcgttatcgcgacagatgattttgatcaataccgaccagtttcctgtggtgtagtggcattctaagacttcggggattttttttaaatctttcacggcttcggagtttctggaggctttgtccagataaacaccaacaaaggccatggtgttgtatcctaatacttttggattaacggtaaatttagaacctgaaataacacccgattgttccagttttttcaatcgctgatgaatggcagctccggaaatacctattttattggcgatttgcaaaatgggttttcgggcatcgtccatcaaatagcgcaggatttctttgtcgatgccgtcaatttcaataataagggagttgattttcattggagttgtgatttgaaactaaatttagttatttggttgtagttgtaaatcaaatgtactcataatgatttgaaaaataaaattccaatctttgaaattccaaatggaaactgaaaatgttgcttgtttttctttgttagagttttaagaatttgacaaagattggggaaaggattattttaaaaagaaaaattccaaatttcaaccctaaagttggaatttggaatttaaatattgttattttctaaaaggattattttcctttgtttgcttctgcaatatatttctctaaagccatcgtcattgaaggtgtttcaggagttggagcaagaatatcaattcttaagccatgatcaagtgcttctttttgagttgtgcttccaaaaacagcaattctggtatcgttttgtttaaaatcaggaaagtttttaaacaatgatttgattccggttggactgaaaaaagctaaaacatcatagtaaacatcagccagatcagatagatcgctcattactgttttgtagaaaacagcttgtgcccaatctactttcagattgtttaatgttacaggtgcatcagcgtttaactgatcagacgccggtaaaaggaatttttcgtctttgtattttttgataagcggcgataaatctgcaaagtcttttgctcccacgtaaattttacgctttctatacacaacatacttttgcaggtaaaatgcaacagcttcagattggcagaaatatttcaatccttcaggaactttataacgcatctcatctgctactctgaaaaaatgatctaccgcattacggctcgtcaaaatgattgcagtataatgattaagatcgattttctgtaatcggatctcttttgcattaaccccttccacatgaataaatggtctgaaatcaatttttattttgtgtttttgttggagctcaaagtaaggagaattttccactttaggttcaggctgtgacaccaaaattgttttcactttcatattataaacatttactaagccgcctcttttgtaatccaataatacaggaaataataaggggctatttcaagagcgcaaagatataaaataaaataaaataacttgctgattattgcattttgatacgtttttattgaaataaaataagagtagaggctaatacacagcgaaatggctattattgccaggggtacaatcttaggaatattgtcataataaaacaaaacagcattaacaggaaggattaaaacgcctatataagtcctgtaagttactttttgtaagttaaaaagttctgcaaattcgtcaatgttgaacgaagtggctacaattttttcaattaaaaattttcccagaataaagtaaagtaaaaaggtagcaagctgaatgaataaaatccagtccgttttcgacgcatatccaaaaatgtgcatggtaagctggatgaaaaaagcatacgaaacaacttgtacaaaaaataaaccaaccgtaaaactgcttcttaaatgattgttgtcgcgatagattttagcatacttgtcagaaaaaataagcttactgaattcgctaaatcgggtttcgtaagctgatttagtcatggcaacaacagcaaaggtcaacacgaataaaagtgttgcccagtctttgttttccagaattcgggggtgaagttgttcaatcatagcgatgcaaaattagtaattttttgtatcaatagttttattatatatttattatgaatcaaatgctataaaaagtttacttttgcggtgaaattactcagaaaaatgaatgattgtattgtcataatccccacctacaacgaaatcgaaaatattgaaagcatagttagagctgtactttcgcaacacaaaccttttcatcttttaattattgatgataattcgcctgaccatactgccaataaagtagtcgctttacaggaagaatttccgggacggttgtttttagaaaaaagagctaaaaaatctggtttgggaacggcctatgttcatggttttaaatgggcattagaacgtcagtatgatttcatttttgaaatggatgctgatttctcgcataatccaaatgatcttgagaaattgtttgatgcctgccattttggtggagcagatctagcgattggttcccgatatgtaacaggagtaaatgtggtgaactggcccttaagccgtgttctaatgtcgtatttcgcttcggtgtatgtgaagtttattacgggaatgaaaattcacgacgcaacagcaggtttcgtttgttacaaacgagaagtgctggaaaaaatcaatctcaacaaaattaaattcgtgggttatgcgtttcagattgaaatgaagtacagaacatactgtgctaaatttgaaattaaagaggttccgattatttttactgacagaacaaaaggagtttctaaaatgagcaatgccattatcaaagaagctatactgggagtaatttcgcttcgattgaaaaaactagtcaatactttataaagctatgaaaatgaatagggttctaataaaaaatgccaaaattgtaaacgaaggatctatttttgaaggagatgttttaatcgaaaatgatctgattgttgaagtagcagacagcatcagtttaaaaacatccgattgtaaagtaatcgatgctgaagggagttatttaattccgggggcaattgatgatcaggttcattttagagaaccgggactaacacacaaaggagatatcgagtcagagtcaagagctgcggtggcaggaggaattacatctttcatagagcaaccgaatacagttccaaatgctgtaactcaggaaatactagaagataaatatcaggttgcggcagtgaaatcatttgcgaattattcgtttatgatgggtgcaactaatgataatctggaggaagttctaaaaacaaatccgaagaatgttgccggaataaagatctttttaggatcgtcaaccggaaatatgctggtagataatgaggcagttttagaaaagattttttcaagtactccgcttttaatcgccgtacactgtgaagacgaaacgacgattaaaaataatttacagctgtacaaagaacaatatggggatgatattccggtaacggcgcatcatttaatacgcagtgaagaagcctgttatatctcttcttcaaaagcggtggcactagccaagaaaacgggagctcgtttgcacattttccatctttcgactgcgaaagaaatggaattgtttaccaataaaattccacttgaagaaaagaaaattactgccgaagtttgtgtgcatcacttatggtttacagacgaagattataaaaccaaagggaattttattaaatggaaccctgcggtaaaaacagcagacgacagaaaagcattatgggaagcgttaaatgacggacgtattgatgtaattgcaaccgatcatgcgccacatactaaagaagaaaaaatgcagccttatgtgaatgctccatctggggggccgcttgtgcagcatgcggtcgtagcgatgtttgaagcgcatcatcaggggaaaatcagcgtggagaaaattgtggagaaaatgtgccacaatcctgctaaacttttcaaaatagaaaaaagaggttttatcaaagaaggttattttgccgatttagtgattgtaaacccaagtttgccatggagtgtgaaacctgaaaatattgtggcgaaatgcggctggtcgccttttgagaattttacttttaagtcgagaattacacatacttttgtaaacggtgaaatggtttacaataactttaaagtaaaagacattcgcgcaggaaaacgcctattgtttgacagataaaaagctgatatgaaaaattttatagtaataatattggtgttgtttctttctgtaagttgtaaaaaagagctggtaaagcagcctgcaaagcttatcgggaaagataaaatgattgatattatgtatgatttgtctatccttgaagcgatgaaataccagcacccggtttcggcagattcagttgaaaccagtcctactgcctttattttgaaaaaatataaagtggatagtgtgcaattttcacaaaacaaccgttattacgccgccgattatgagaattataaaagtattttcgacgaagtaggaaagcgtttggctgtcaaccaaagagctacagattcaattgtgaaaattgaagaaaagaaagcagcaaaagaaaagaagaaacctatagttaaagatacgatcaaaaacaagctgagtaagacgagcttggattctatccgaaaaacaacacgattaaagagatagttaaagtctcgaaacatcttttatgtacgcatgtacatcctgaaaaaccgttcctcccagagcggtttttattttttcattagaatataaattactagaataggaagcctttgcagttgcttttgtcaggcgtcttttctgaaaaaataaggtcgaaaaaattccgtcgacaacccaaaggaaattcatgaataaaggtgtggcatgaacggttggtctttttacttttaaagcgtcggcaatagtatccaggatgtctttaaaaacaatattgtcggcaattaaagtaaagcgttcgtttttaatgtcacttttcattaaggtgtcagctatttttatgacatccgttatggtaacaaaaccggtacttccaagagtgtaaaaagaaaggccgtttgcaactttggcataaagctctgcgcttccttgtatgtgggttttgttttttggaattggccctaaaataacacccggatttaagatgattacatctaaaccttcttgtaaaccacgccagacttccatttcggctccgtatttagaaatcgcgtaatcactatgaggcttttcgggattccagtctgtttcttcagtgatataagtttcatgagctgctaaatcacctaaagcagcgatagagctgataaaacaaaacttttttatgtttttggcaatagaaaaattaaccatattggcagttccttcgatattggtttttcgaagtaactcttcgtcttttggatcaaatgaaattaaagcagcgcaatggtaaacgtaatcaatacctgagaacgcagtttctaaagagggaacatccagaatatcggattcaagccattctattttttcaaacagatccacttttttgtacaactcaaaaaccgatttggttttttgaatgttattttgagttctgtaaatagcccgaacgttttctccattctcaatcagatgaagtaataaatgtgcgccaactaaacctgtacctcctgttattaataccatttcgtaaagatagtactttggtctaaagttgcaaaaaagggacaggtttaaaggcgcaagtttttattcaattttgtttttttagaaaatcgtataccctagtataaaatctaatgatctgtaagctccgctataagaggtgtatccgctaaggatctctttgcggccatttaccctaatttctgcactcactttgttcttgaaattgtaaccaagtccggttagaaaattaccacttgtggagctgtctaagttggttggtttgcttgtaagtttgaatttaccacttacatcaatggcataaccggcattaataaatattttagatttgctgtttaggaaaaaataataacgtactccaaagggaacctgtatggctgtgtatttaacctctgaaggaaattcgactctcataccatcattcatgtaatttataactccggtttcgctcttgttttcgtactgttgaaaggttgggtttataaaaagactccatttgtttttgttgaaagggagtataagttcgccttccaatcctattttaaaagttactttctgagagtagtctacgctattatatccatccctattgatgccatcaattgaaatagaagaaaaaccaatgcctggagttacttttaaaaggtaaatacttttatttactgaggtaattgttttttcgatttcgtcagatgagatattattgtatttcaggaaatatttcatcaaagcctcttttttataaggcaggttcttaacatcattttcagttgtgtttttggttttgacattgttgaataattgctgtctgaagtaattgttttcaactgttgtgcgggagttattcagttcagcaatgtattctttacgtacaagttgttctacggatctttcttttgtttcataaaagaaccttgtaatgtcattattggtatagtaatataaagaagcgtctcctgtaacaaggacttttaagaaaacgagctgttctttccaaatgggatttttatcggtggaaaaactttctaatacgtcacttgaaaggtcaatgttaacttttgctcttttgtatgtagtgctgtttccaattccaaactcttgaacattcgtaatggtttctgttttcgtttcggtgtcttcgttagttgttttgtacttaaaatctgttgggttgtagttccagtctatgtttttgatataacattcagttcggattccattattggtaatgaaatatcctttttcaaaagagatctgggcgttcgtaaaggagtaggagagtaagattgcaagaagcaaaagttttttcataaaggtaatttttggttggttattaatggattagttgaggtaaaaataggtaaaaagtaatgaatgaaaagtaaaaaattataattggagtttttttttttgaacagctaaagttctaagtatggttctctttgtagttaagaatttggatgttgaaattgttttttagcattgatattgaaactgctttttgtcattgccattaccattgattatatttgcacaaattatttaaaaaatgaagaatctagttgaagaattaaagtggcgcgggttatatcatgatagcatgccaggaacggaagaacaattgctaaaagaggtaactgctgcttatataggttttgacccaacagcagattcgctgcacattggcagcatggttcagattattttattggttcacttaaagaattttggacatcagcctatcgctttggtgggaggtgcaaccggtatgattggtgacccatcggggaaatctgatgaaagaaatctgttgaatgaagaaactttagctaagaacgttgccggtatcaaaagtgttttgtcacgttttcttgactttaattcaaaagaagcaaatgctcctgttatggtaaacaactatgactggatgaaagaattctcatttattgattttgcacgtgaagttggaaaacgtatcacggtaaattatatgatggcgaaggattctgttaaaaagagatttgccggagacggtgtaggaatgtcttttacagagtttacctatcagttaattcagggttacgatttttatcatttatataaaaataacaattgcgtgcttcaaatgggaggttcggaccaatggggaaatatcaccaccggaacggaattggtacgcagaatgggaggagaaagtgcaaaagcttttgcattgacaacgccattgattacaaaagcagacggatctaaatttggaaaatctgaaggtggaaatgtttggttggatactgataaaacctcagtgtataaattttaccagttttgggtgaattcaactgacgtagatgcagaaaaatacatcaaaatttttacatttttagataaagaaacgattgatgctttaatcgaagagcacagaactgctccgcatttaagagttttacaaaagaaactggcagaagaaattaccattttcgttcactctgaagaagaattggaaaaagcaattcaggcgtcgaatattttgtttggaaattctacagccgaagatttgaaaaaactggatgaagctacttttttagaagtttttgacggtgttcctcaggctgaaatcgcaaaagctgatttagaaaatggtttggagattattacagttttaaacgaaaaaacaggtttctttaaatcaaacggagaagcgagacgtgccttaaccgcaaattcgatctcggtgaacagagaaaaaataaaagaagattttgtgttaactgcaaatgacctaatcaacaatcagtttgtgttattacaaagcggaaagaagaattattttgtgattcgagtggtttagtttttaaactaacgaaaagataagttaaaagcatcctgtatcaggatgctttttgtatgaatgggcttttttattttttgtagatctttcgtgttgtatcattagatttaatgatatagaaatcattttttaaggattgcactaattcgttttcttcttgttttgagtgtacttctttcgttaagattttttctccttggaaattatagactgttatagtatagttttctggtatatcgtcagtttctaattttgttgctatcgatttttttccagaaggattatagaaggttacaggtataactgttacgttgttattttcatttgattcggtatttgttttagaatcgtcaacaaccataagaatgttccagttattgttaaatacagtactaatattgccaaaatctgaggggaagatagtcccgcctggtactacaagcaattctcctgcgttaatggcatttacggttatagcacttccgtttgattttaaatctgatgtatcgagtgtcgtatcggaggacaggtagaatcttatatttgttgctgttgatgctgcatttcctatgtttttgatagatatgagtgatggcctaattgacccggattgattgtcgactctatgccttttttttaattcacttaaagtagaagtgcaatcaaaacaatcactataaactagtgtattatttgaatcgataattaaatcaggttttcctatcggagttggtgttggtgttggcgttggggtcggagttggcgttgtaggggctgttccttcttttatagttattctgtatgttgatgaggcgatgttattatattcgttgaaatcttcactgtttgtagttacagcggttaaatagtacttaccggcaatagcattgtagggaatgctgtagaccattgggaagttatgggatgtttttggatctgaaggtgcaggtgcatctgtaggattctgaccaacagcatatagtttaatgtcgttgccactgagaaagtttcttgatgtcgtgaggtataatgtatatacagtagtcgcgttttgaatttttgtgccaatatttcgtactccgaaataagcaattttgttgcttgttccacggtaataattaccatcgtcctgatatggagtaacatgtacagcttgcagatcgggtttttgacaattgaataaaacaagggaaaattgagaattgctatctgttgaatctacttcgtaatctgcatctccgctttctacactagctccatcaattaaataaaaattagggccttttccaaaatccataaaacaaatgtcaccagaagataacggtttttctattttaatatttaccatttctctggtactattaactgttaactttgagcaaaagttattttgagcttcttgtaatgttgatcctaataaaattggtcttatatactttttagacaatgaagagcataagtcagtaattggagcgccaaaatcaggtggggtgtcaacttcatctcccatgtcagcaccagaatctcctgcataagtaactttgtaataccttgtgccgaagttgccgtagtttaggcctaaatctgctttgtaaattttaccaacttccaatttaaaattttgtcttaaatttacttctctaattcctacgggaggataatgctgggtgcattcaacagcaatagcccattctatagtagtgcctaaatcttggagttcgtggtatctataatttggattctgtgacctgcttgtaaagctaaaaaggataaaaactaatagggtaatttttttcataatttaatatttaaaaagttacagtgaaagtaatttttaaatatttgtgtagtattttttctacattaacaataggttattaaattaggtatttttttacattgaacttaatgataaaatagcagtagtattatggcaaattttgtttacaaaaccatcaaattgcagccacgaatatcagaatcatcaaaacgtcccaatacttcaaaagagttgttgggattttttttaatcgattttttcacgattaaacgattaaccaaattaacggttcaacatttacaaaaccattaggttacagccacgaatatcaaatataggattcgtgctgtttttatgtcttttttgttcaatttcaatcgattaccttttttaaatgtagtcttttactttcttttttgccgattttgaaaaaagataaaatattttcattcttttaatccgtctcattttgacgttattagggcaggtttttccgatgatttacctgctttttctattttccttttttctgtaaattgaaaaaactggaaaattatacttgtttagtgttttccttttttctaattttagtataagaaaaagttaaacaaaacttttttgttctttttccaaaaacaactatttaagttattatgtaatacatcaaatagtgttttttgtatgattatctagagttgaggttttttataataacttaattagtttgcgtatggaattgatcactactttctttatcaagtttgcattaggttttcgtattgttttagctttatcttgtaagagtttgaaaaaaaatgaatttatcatcaaatttaatttttgttccacttcagacttgtttcataaattttccagttttagtatttttttattttcaaatcctaataaggggtttgttgatgaaacgtattgttgtgtttaaaattttttaaatccgcacggcgttttttaaaaatgaattgattcaatttttagagttctgttctaaaaaaacaaagtttataaaaagaataatcagctttttatgaatattgaatcagactatataggaggtagaatttcccagttctccaaaacgtatattttctttcatgaaaattggttaataacaaatcaccctttttgggagtctgatttcgatcggtatttccacactattttttggtatgtcttttattcgaaagaataggagcggttctttaatgtacttctgtttagagtgtacagcatgatttttttttactgaaatgttgtttacattcttagtattctgggaatctaaattttatttcaacaagttgattattagtgttttttgaaattgcctaagcataagtgcttatcgcaagaggtattttattgtccattttctaatcttccaaattatgaaaaaaaaatttactttttatgatcttcttatgaagaggagattattgggattaatttttttactgcttttttgcaatgaaaattttgcccagactttttgtagacccacctctcaaaccaacagtagagcaggagtatgtttggggactacagaagtactaaacccaacctttgcttatgatgcaaatacaagtacgtatgcatcattgaccaatgcgctgggtgtactttgttccgtgcaggaaacagttaagtttagtcagatggcgaaagccggcgaccagattgtaattgtgtacggatcaaatgccgatttgctggatgttggattattgtctaatgcgacaatccagccaagcaattcagtcaatagtacaagtagtacggcattggctttaaacagtccattgctgaatgtgaacgctattagcggagcaactacaggtacaataaagtataccctaacggccgattccgatcaggttaaggtagaaattgggggattacttagtgtcttgaccaatatacgtatatacgatgtgcgattggagtttgcaaaaccaaccattaccggaggagccactcaatctgtctgtgtaggacagtctattgcacttactgcaactcctgctgccggaactacattggcctggtacagctcgccaacatctactacagctctttcaagcgtgaatacttttacaacaccggcactaaccacaagtactacttattatataggtataaccagaagtgcaggttgtgaaagtgacgaaagatttccggtaactattaatgttttagaccctgtattgccaacgattagtacggttggaacttcaatttgttcttcgggagcgacacaggcaacgaccttgtcggttattaatccggtactgggaacgacttactcctggtacagtgcaccaacaggtggtgtggcattgagtacaggcagtacctatacgccaaccgttccgacgggtgtgaccaatttttatgtcgaagcatcgattggttcctgtgtgacaccaacacgaactttggttacggttacttcaactccggttcccggggtcgctactattttaacccaaagcgtatctatattatccggtcagaatgctactctaagtgcttcaacagctgaagcaggagtaactctggattggtatgacgtacccactggtggaacaaaattattaggagattcaaatacatttaccactccaatattagtggcaaccaaaacatattatgtggagtctcgtaccagcgcgggaggctgtgttagtgctacgagagctcctgttacagtaacggttttagcgaatcctttgggaggatgtctggaagccaacagtcagcaaactactcaaaacggtctttgtttactttgttcttcaagtgcccagggcaattctgttgacgggaatagtactacttcgtcttctattacgctgccggtaggtttggttaatggatggattcagcaaacattacaatttaataatcccggaaaaacaggtgattttatagatgttgatttggagttaccgggaggaatagctgatctgagcttgttaggagctgtgagtctggctacttataatggtgctacttataataatgatcgcaattttatcaataacgctctggttaccttacagctgttgtcagggaataaatttagagcgactattactgcgggagctaattttgatcgtgtagaagttagattaggcggactggtatctgccttaactacattaaaaatttatcaggctactcatcgctataagttgccgtcatttacaggaaataccacaatttgcggagggcaaacgactactttaacggcaaatattgttgctggcgaaactattaaatggtatgacgcgctaacaggaggaactttattagccagcacagcagcttatactactcccgcattaacggtaaatactacttattatgtagaagttactcgcgatggttgtgtgaatagcgaaagaaatcctgtttctgttacggtaaataatccgatagcaccgggaacggttgtagctagtcctttgaatttgtgcagcggaacttcaacaacaattaccattcagtcaccggttgccgggactgtttacaaatggtatgatgcaagctccggcggaaatttggtgtttacaggtactgttttcaatacgccaaatctgaccgctacgactacttattatgtcgaagcttcaatcgcaagttgtatcagtgcaacccgcacaccggttacagtcaatgttaatacacgaccttcagcaccagttgcggtatcttcacctgtgattattcagtctggtcaggatgtaacactggcggttgtgactaatccaggtattaaacatacgtggtatgatgtacctacgggagggacttttttggccactaatgttgacagttttacacctagtccggctctaaccgccagtaaaacattttacgttgaggcggtagatttaacgtcagattgtgccagtagtacaagaactgcaattgttgttactgtaattagcggagtgaataattgtttattagccaattcacaagtaactactaaaggaggtactacaaactgtttaacctgtagttccagtgcagatggaaactctgtagacggtaataatgctacggcagctactctttcaatccctattggtttagtaacagatcatattcagcaagatttaacttttccaacaacgggacagacaggcgatatcatagatgtggaactgggaattccggttggacttcttgatattagtgcactttctaatgttagcctgcaaagttttaattctggggtacctaacggagattttagcaccatcaataatcttctgaatgttcagatcttatccggaaatcgtttcaaagcaagttttgttgcagcgggtacttttaacagtgtgcgtgttcgattaaatggattagctactcttttatcaagtctggagatttacgaagcttcttatagatttgccaatgcggtaataacagggaacgcaacaccaatttgtgccggacaaacagcttctttaacagcatctgcaaccggaggagatacatttgtgtggtacgatgcgccaaccggaggaaacatagtagctgtgaatccaacagctgcattaagtgccactactacattttatttagaggctacacgtggcggaacttgtatcaatacagttcgtcaggcagttacggtaacagttttacctctgccaacagccagtgatatcaatataacaagtcctgtaacagcttcttgtgcaggaggtattgttttgactccttcttctcctttagcaggagcaacattcaagtattatttagatgcaagtaaaacacaggaagcaaccggaacgatagccggggttacttattctaaagatttaggaacaggcgcccttaccatcagcggacttacagccttaaatgctccttatacgtattatgtgtctgtactaaatggaggtatctgcgagaatgcatcaggatttcttaaggaagttgttgttaatttcccaacaggtactgctttaacggtaacaccaactttgtctggttgtgctaaagtaagtctgaaagatgcgattacaaactttgatacatcaggaaacactacttatacgttctttgatgcgggaaataatcctattacagatcaggcagcgtcaaatattactgcaaatggtaattattttattcaggctcagcttaatggaggcaattgtccgtcagttaagctacctgtagcagtaacggttaatccattgccaactttaacagtactaacaaattcagtagcggttactaaaggttcttctgttgctttaacagcgacttcaaacggaactataacctggtacgatcagcagggtaatgtgttgccttcaaataatacaggtgttcttaatacggttggtgtttttgcttataccgtaatagccagcaatggtacctgtacagttagtcagaccatcacgattagcgtgattgatcctgctgcctgtgataccttacaggaaagagtgtatgccaatacacaatcttcaggaacaattattaccggaggggtaactaatggacctcttgctgtcgataatgatccaagcacgtattcaactattacaaccggtttaggacttttgggtattggaacgacctggcaaaatttgcaatggccaactacaattgccaaaggaacaccggtaacggtaaaattaggtttagataacagtttgcttgctgtagcacaaagtatctcggttgtaggtactaaacgtgacggatctaataatcctatcgatattggaacattacaatcagttacaggatctttattgaacctgttaccggggcaaaattcattcgaatatacttttgttccttctaatgcttccggacttcaggattacgatggtatccgtgtgcagttgggatctgttttaagtgtagcacaaaacatcaatgtttatgatacttattacaaaagagaagtggctcagatcacctgtggtcagggagatatcgaagatattttctctggcgtaaaagatctgggagtaggagctttaaccgctacggttggagtttcaaatccatggaatatagccgataaagatattgcaacttatgcaacaatgtttaacgctgtaggagtattggcggcttcggagttgactgcaacttttagaacaccttctatggtaggtgacagtttaagaattgtaatttctaaaccgggaacggttttaaatcttaatttacttaccggatttactattcagctttactctggaaacattccggttggcggaccaattgccaatacaagcagtcttctgactttaaaactgctttcaggagatacaatggctatgactattgttgcacctcaaacgcagccttacgataaagtagtgataacttatggaggtgttgctactgttttagatcagcttagagttcattcagtagatcgtacaaccaatacagaagttattggggccgatcctgataataaaataacagtctgtccgggggccaacctcacgctcgtcgtccctccgaaaccttgtgctgattatgcctggtacgattcgcctacgggaggaaatctgctggccagcggtcaaacttatacacttcctgctacattagctgccggaacgtacaaatattatattcagccaattcgttacggatgtccggctctggaaagaggtgaagttacagtaactgtaagagcaactgttcctgcagcaactattacaaacgttactataaatggaggtagtacgactattatttgttctgaaagtggtacagtaacaatagatgctgttctaagtgctacaccagtacttaccaatccggtataccactggtatagttttgatggtacaacaagtcagccaattcctggtcaggtaacttctaaattaatagttaccggtttacttccagggacttatacctattatgtcggagtaagttctgacgaatattgcgaaactgctccggcagacagaaaacaagtgacttttactattctgccaagttcactggtatccgatatttcaataaacaatgcttctatttgtcatgatacccccgcggtactaacaccgtcaagcactctgacaaatcctgttttttcctggtatttagatgcgaacaaaacgcaacctatttttagcggaacaattggcggagtaacctatgcaattagtggtagcggagttttaaccgctacaggtttaacaccggcaatgagtccgatgatttattatgttgcagtttcaagtgattttacttgtcaaaataaaaatggagaattaagattggtgaccgtgcttattaatgatccggggacaccaacatctaccacttataatcagaatttctgtttgataagtaatcctacagttgctaatcttcaggccgatcagactaatgtggtttggtacagtgcagccacaggaggagtagcattaaatccgacaactgctttggcaaacggaacctattatggtgcgattagagatgtgaatggttgtgaaagctcagttcgatcagttgtaaccgtaatcgtaaacgatccgggaacacctgtgattactaaaactactcaggacttctgtttggtgaatgcgccaacttttgcatcaatcgatgtaagtcctgctgttgctgctaatattgtttggtatacggcgctgaccggaggaaccttaattccatctactacagctttaactaccggagtttattatgctgcgatcaaagatcctacgactctttgtgaaagtaatgtaagattagccattacgataaacgtaactgatccgggaactcctgtgattacagaaactactcagaacttctgtttggtaaatgcaccaacttttgcatcaatcaatgtaagtccggctgtcgccgccaatattgtttggtacacagcacttaccggaggagttttaattccatcgacaacggctctgactaccggagtttattacgctgcgattaaagatccaacaactctttgcgaaagcaatgttagattagccattaccatcaacgtaaccgatcctggaacaccagtaatcactaaaactacacaggatttctgtttggtaaatgcgccaacttttgcctctattgatgtaagtcctgctgttgccgccaatattgtttggtacacggctttgaccggaggaactttaattccatcaacgacagctttgactaccggagtttattatgctgccatcaaagatccaacaactctttgtgaaagtaatgtgagattggcaattacaataaatgtaaccgatcctggtaccccaactttagttactgccggaacgcaaaacttctgtttggtcaatgcgccgacttttgccagcgttcaatttaatgaagcgaatattgtttggtacaccgcgcttaccggaggaaccgttattccttctactacagctttaaccagtggtacttattatgccgtaattaaagatccaacaactctttgtgaaagtgctgttagattgtccgtaacaattagtgttaccgatccaggtacgccaactttagttacagcaggaacacaaaacttctgtttggtaaatgcaccaacttttgcgagtgttcagtttaatgaagccaatattgtttggtatacagcgctgactggaggaaccgttattccttctacaacagctttaaccagcggtacctattatgccgtaatcaaagacccaatcacaaattgtgaaagtgccgttagattagctgtagtgatcagtgttaccgatcctggtacgccaactttagttacagcaggaacacaaaacttctgtttggtcaatgcaccaacttttgcgagtgttcagtttaatgaagccaatattgtatggtacacagcattgacaggaggaaccgttattccttctacaacagctttaaccagcggtacttattatgccgtaatcaaagatccggtaaccaattgtgaaagtgcagttagattagctgtagtgatcagtgttaccgatccgggaacgccaactttagttacagcaggaacacaaaacttctgtttggtcaatgcaccgactttcgcgagtgttcagtttaatgaagccaatatcgtttggtacactgcattgacaggaggaaccgttattccttctacaacagctttaaccagcggtacttattatgccgtaatcaaagatccggtaaccaattgtgaaagtgccgttagattagctgtagtgatcagtgttaccgatccgggaacaccaactttagttacagcaggaacacaaaacttctgtttggtaaatgcaccaacttttgcgagtgttcagtttaatgaagctaatattgtatggtatacagcgctgactggaggaaccgtgattccttcgactacagctttaaccagcggtacctattatgccgtaatcaaagacccaatcacaaattgtgaaagtgctgttagattagcagtaacgattaatgttaccgatccgggaactcctgtgattacagaaactacacagaatttctgtttggtcaatgcgccaacttttgcatcaatcaatgtaagtccggccgttgcggctaatattgtttggtataccgctttaacaggagggactttaattcctttgactacagttttgaccagtggtacatactatgccgctataaaagatcctgtaacgaattgtgaaagcaatgttagattagccattaccatcaacgtaaccgatccgggaactcctgtgattacggaaactacacagaatttctgtttggtgaatgcaccaacttttgcctctattgatgtaagtccggccgttgctgctaatattgtttggtatactgcgctgaccggaggaactttaattccgtcgactacagctttgactaccggagtttattatgctgcgatcaaagatccaatcacaaattgtgagagtaatgtgagattggcaattacaataaacgtaactgatccaggcactccaactttagtaacagcgggaacacaaaacttctgtttggtcaatgctccaacttttgcaagtgttcagtttaatcaggctaatattgtttggtacacggcgctgaccggaggaaccgttattccttctactacagctttaaccagtggtacttattatgctgtaatcaaagacccaatcacgaactgtgagagtgcagtaagattggctgtagtgatcaatgttactgatccgggtactccaactctagtaacagcaggaacacaaagcttctgtttggtaaatgcaccaacttttgccagtgttcagtttaatgaagccaatatcgtttggtacacagcgttgactggaggaacagttattccttctgctacagctttaaccagtggtacttattatgctgtaatcaaagacccaatcacgaactgtgagagtgcggttagattagctgtagtgatcagtgttaccgatccgggtacaccaactttggtaaccgcaggaacacagaacttctgtttggtaaatgcaccaacttttgcgagcgttcagtttaatgaagccaatattgtctggtatactgcactgactggaggaacagctattccttcaactacacctttaattagtggtacgtattatgcagcgattaaagatccggtaaccaattgtgaaagtgccgttagattagctgtagtgatcagtgttacagatccgggtacaccaactttggtaacagcaggaacgcaaaacttctgcttggccgatgctccaacttttgcaaatgttcagtttaatcaagctaatattgtttggtatacagcaccgactggaggaacagttattctttctactacagctttaactagcggtacttattacgccgtaataaaagacctaattacaaactgtgaaagcgccgtaagattagccgtaacgatcaatgttgctaatcctgggacacctacactggtaacagcgggaacacaaaacttctgtttggtaaatacgccaacctttgccagtgttcagtttaatcaggcaaacatagtttggtatacagcagcgactggaggaacagtgattccttccactacagctttaaccagtggtacttattatgcagtgataaaagatccggtatcaggatgtgaaagtgccgtaagattagcggtaacaatcaatgtgaccgacccgggtacaccaacactagtaacggaaggaacacaaaacttctgtttggtaaatgctccgacttttgccagtgttcagtttaatcaggctaatattatctggtataccgcactgactggaggtacagcaattccttctactactgctttaatcagtggtacttattatgctgcaatcaaggatccggtaaccaattgtgagagtgcagttagattagctgtagtgatcaatgttacagatccgggtacaccaactttagttacagcaggaacacaaaacttctgtttggcaaatacgccaacttttgccaacgttcagtttaaccaggctaatattgtatggtatactgcaccgactggaggaacagttatttcttcgactacagctttaaccagtggtacttattatgctgtaataaaagacccaattacaaactgtgaaagcgccgtaagattagcagtaacgatcaatgttacggatccaggtacaccaactttagtaacagcaggaacacaaaacttctgtttggtaaatgcaccaacttttgccagtgttcagtttaatcaggctaatattgcctggtatacagcattgactggaggaacagtgatttcttccactacagctttaaccagtggtacttattatgcagtaataaaggatcctgtgtcaggatgtgaaagtgccgtaagattagcggtaacaatcaatgtgaccgacccgggtacgccaacaacaacagttgccactcaggtattctgctcaggaaacaatccaacggttgctaacattcaggtaaacggaagcaacattgtgtggtatacaactgcaactggcggaactgtcgttgcaggaactacaccactagtaaatggggattattatgcagcgataaaagatccggtgtccggttgcgaaagcagcgtgcgattaaaagttacggtaactattggaatttctaaagatccaaccacaactgctacagctcagaatttctgttctacaagtgctccaacttttgccagtattcaggttaacgagagtaatgtagcatggtttagcagcgcaacaggcggaacagcaattccattaacaaccgctttaacttccggtacctattacggagagcttacagatccggtaacaggatgtaaaagtgctaatcgtttgcaggttgtcattaccattgtaaccccaatggcgacgcctacaactaattcggcaactcaaaacttctgttcggtagatgcaccaaaagtatctaacattcaagtgaatgaatccggtgtaatctggtacagcactccaacaggcggaactgctattcaggcagctacagctttaacgactggtacttattatggagtaatctcaagcagttctggttgtgaaaatccaattagactggccgttgcagtaactgtaaacacaccgcttaatgttactactccaagaacgacacaagtattttgtttatcagcagggccaacagttcaggatattgtagtaaatgaagcgaacattgtttggtatacaactacaactggaggaactccgttggcagcgaatacacctcttgttgcggcaacttattacgcagcggcacaaagcaacattaccaatggctgtggattagttccgagattaggagtgactgttgcatttgacaatgatgcattggttcctattactacgacggatgatacgccatgtgtattccagggagttacttattcgattgccaatggaaaatcaaattatgtatggtcagtttctaacggaacaattacttcaggcggaggacttaacgacggttctgtaaccgtttcctggtcggatattggaccgggtaaagttgaggttgagtatattaatacttgcaacgagagaactacaaaatcattaaatgtaactgtagcaacttgttctgatctaacgataaccaataaagtaagcaatgcgaaacctaattttggtgatcagataacatttaccgtaacagtaaataatattggtcagggtaattttatcaatacgatagtgagcgatttattacctagcggatataatttgataagcgcatctgcaactgccggaacatacaatttgttatctcaaatttggacgattccaacgttgaattcgggacaaagtgttgtgcttacaattgtagtagaagtattgccgggaggtaaatacttaagcgttgcaactgtcgagacttccactccgttagatgtagatccatcaaataattcggcttcagtttctgttgagccagtttgtttgaccgtttacaatgaatttactccaaacaatgacggggcaaatgatttgttcagaattgattgtatcgaaacttatccaaataatgagttgaaagtgtataacagatacggttcattagtatatagtaaacaacattatgaaaatgattgggacggaaccgctaatgtatccggagttatcaacagaggagatatgctgccaacaggtacttatttctatgtgatagcaataggagacggaacggttaaaaaaggatggttatctataatgagataagctgccgtattaatcatctaattaattaaacttaataagtatcgttatgaaactatatataaaatcattagaatcgtatttcattttaatatgttcttttatcacattttgtgccagtgcacaacaggatccggagtacacgcaatacatgtacaatacgatgtcggtgaatccagcttatgcgggatctactggaaccatagaggcgacacttttacatcgttcgcaatgggttggaatcgatggtgcacccgaaacacaatcattttctgttcattcaccgcttcgaaacgagatgattggtttaggactaagcgttgttaacgacaagattggtccgtcgaacgaattgtatattgatggaaacttcgcttactcagttcctctgggatatgaaaaaagactcgcattcgggttgaaagcaggtatgagaatgttaaatatagactggtcaaaaggacgattctataataacaatgatgtattgctgaatcagaatattaataatcaattgaaactggctgtaggagcaggagtttactactatactaacaaatggtatgttgggctttcagttccaagttttatcagaagtgattattacaatgatattcaggaatctatatcttacgatcgattgcactactacctgatgggaggttatgtttttgatctgaatccaaacttaaaatttaagccggcatttttggtaaaagcagtgagtggagcaccacttactgctgatatctcggcaaattttatgatagcagaaaagtttgtaataggaggatcttaccgaacagacgactcgataagtattctggcaggttttcagatatccagaagtttttacgcagggtatgcttttgattataccgttagtgatttgaataaatacaacgatggatcacatgagatcatcttgcgttatcagtttactaaaaaacaaagtaaaatcaaatcacctcgattcttctaaaacataaattctatgaaaaaactatatatcctcagtttagtcttgagcattacctttggttttgctcaaaagactaatttaaaaaaggccgatgcattgtttagaaacttctcttataccgatgcagctaaagcttatgaagagtgtttacagaatatagagaatccaacagcacaaaccataaaaaatgccgcagattcttattattttatttccgacggaagaaatgcgcttcgatggtataaaaggctctatcagatacaggggaataatctgaccgacatttattacctgcgctatattcagtgcatgaaagctgttatggattatgacgaggccgataaaattaccaaagagtatctcaataaaaaaggagatcagaaagagatcaatcggtatgttgctcagaaaaaacaattagacagtctgaccaaaacaaagtctttgtacgacattagaaacttagacattaatactggtaaatctgattttggagctacattttttcaggaccgaattgtgttttcatcggccagagatactacgaagtttgctgataaactttacaactggaacaatcagccttttcttaatttgtatgtagcagaacgaaatcctgctgacggaggtttatttaacgaaaagctgtttatccctaacgtgatgactaaatatcacgaagcaaccgcctcttttgatgccagtggaaaaacaatttactatacgtctaatattgtcaagaaaaacaaattagtagttgatcaggacagaatcaataacttccaaattctaaaaggatctttggtagacggaaaggtagaaaacccgcaaaagattttctttgatagtgatgattattctgttggacaccctagtttgagcgacgatgggaaattactcttcttcgcttccgatatgtcgggcggttatggtgagacggatttgtacatggtaaaaattgcaaacgacggaaccatgagttcacctcaaaatctaggaccaaaaatcaacacattaggaaatgacttatttccattttttcgaaacggaatactttatttttcttcagacggacattatggtttaggagatttagatgtatacgaaagtaaattgttatccgatggaagcttttcggcaccgaaaaatttaggagctccgataaacagtaataaagacgattttacttttgtgattgataaaaccggaagttatggatatgtgtcttcaaacagggcaggaggaaaaggagatgatgatatttattcctttacaaaaggtcagcctgtttgcaatcagaacatttcaggtaaagcaatcgatcataaatcaaaagcacttttagccgatgttacagtaatagcttatgatccgtataatgaagttttggcagaaactaaaaccaattttgacggtaaatatgcggtaacagttccttgcaataaagcggttcgtttggtagcttcaaagtttaattacagtgatgacgaaaaaaaggttgcaacaaccaaaatcaatgaagccgaaattaccgatgttgattttgagctcagtaattatgatgacctggtagtgaaaaaacaaggagtcgaaaaagtagacgttaatccgatctattttgattacgacaaatacaatattacacctttggcagccactgagctggataaagtagtatttgtgatgcgaaaatttcctaaaatccgcatcaaaattgagtcccataccgattccagaggtaaagatgcttacaacctgaaactctcagataatagagctaaatcaacacgtgattatatcctttcacaaggtattgacactgcaagaatcgaaagtgctattggttacggtgaaagccgtccgatcaataaatgcaaaaatggtgtaaaatgtaccgaggcggaacatttgttaaacagacgctcagactttattataattcaaaaatagagttacattttcacactaatgattggatttttagtatgaatatgtgaaatgaagaaaccatttggaagttggtttttattaattcttttttaagaagaatgggcaggaagaaaatcaagttgcatctttttgcaacttgatttttgagtttataaaacttttggattttactgtttttgaacaaaaataatcctaattttggtattcagttattcaaaatcaaaacctcctgtatattaaaatcttatgagtattcaagaaacaattcagactttacgaaacgaacttaatcagcataattacaattattatgtgttagacaacgctacaatttctgattatgattttgatattaagttaaaggaacttcaggatttagaaaataaacatcctgagttttttgatgaaaactctccaactcaaagagtaggaggtgctgtgactaagaattttaaaactattgcacaccagtacaggatgtattctttggataattcctattctaaagaagatttactggattgggaaaccagaattcagaaagttttagggaatgttgatctgcaatatacctgcgaattaaaatacgatggggcttcgatcagtattacttatgaaaacggaaaactggttcaggctttaacacgaggagatggttttcagggagatgaggtaaccaacaacatcaaaaccataaaatcgattcctttacaattaaaagggaactatccggataaatttgatattagaggagaaataattctgccttttgccggtttcgaaaaaatgaatcaggatctaattgaaattggggaaacgccttattcaaatccaagaaatacagcctcaggaagtttgaaattacaggatagtgctgaggtagccaaacgtccgttagaatgtttattgtatttcgttacagggaataatctcccgtttacttcccagtttgaaggattggaatctgccagaaattgggggttcaaagtgcctaacgaagcaaaactggtgcaaaatatgcaggaagttttcgacttcattgattattgggacgtacaccgtcataatttaccttacgaaactgatggtgtagtggtaaaagtaaacagcattcagcatcaggaagaattaggatacactgcaaaatctccacgttgggccatagcttataaattcaaatcagaacaggtttctaccacacttcagtctatttcgtatcaggtaggccgtacgggagcaataacaccagttgccaatttagagccggtacaactggctggaaccattgtaaaaagagcctctttgcacaatgcagatcagattgaaaaattagacatcagaatcaatgacaccgtttttgtagaaaaaggcggagagatcattccaaagataattgctgttgacctgtccaaacgccccgaagactcggaagttactgcatacatcacacattgtccggaatgtcaaaccgaattgattcgaaatgaaggagaagccaatcattattgccctaacttttatggatgcccaccgcagattatcggtaggattcagcattatatttcaagaaaggcaatggatattgaaggtcttggtggcgaaacagttactttgctttttaacaatggattggtgcacaattatgccgatttatatgaattaaaagtagaagatattttacctttagagagaatggcgcaaaaatctgccgagaatctggtaaaaggagtagagaaatcaaaagaaatcccatttgagagcgttcttttcgccttaggaattcgttttgtaggggaaacggttgccaaaaaactggcgaaacattataaaaatattgatgcattacgtcaggccaccctcatggatttggttttggtagatgaaattggagaaagaattgccaaaagtgtaattgaattttttgagaataaagagaatcaggaaattatagaccgtctcaaaagttacggcattcagtttgaaattgtagagaagataaacccgaatgctaccgaaaaatttatcggaaaaacatttgtggtttcaggagtttttactcaattctccagagacgaattgaagaaaacgattgaagacaatggtggtaaggtaggaagctctatttcggcaaaaacagattttgttgtcgcgggagataatatggggccggctaaattagaaaaagccagtaaattaaatatccctattctgtctgaggaagattttataaacaaactaaatgaaagcgaataaaccgtcgttgattttattttttttagcattattgtgcacggccatttttgactggaccgagctgtttttatttgcgacttatgccaaagccattgtaattccttcgatttttatttactttttgattagcaccgaattcaatatcgggaaaatcgaaggggttatctttttattcagctttattggtcaggtgtttaatctaatggatatcgagagctctgaactaggaggagtcttgtgctttttagtcgtttaccttttaattatccgactttatctgggagggcatgaaaaaataaaactggaaaaaaaagattttcttccagtttctatagtagttatttttattgtatatctcttagtatcagcactaggaatgcaatttgataatatgaaacgatttagtctgatttatatgatctacggaattgttttaagtgtgttaagctgtttgtccttcattagttatattaccaaaggaacctacttggctttactcatgtcattaatggcaatttcctatatcttttcagatatattctatattttcaatgaatacttttcctattctgtagttctggtattgatcagagatgtcactcaaattttagcgtacttttttatggtcgagtatttcctggaaaaaacgaaaacaaaaaaaaagaaaagcgctaaacaataatcgatttcccttcgttcgtgtgagctttgttcttatcgaagtaaaaatctattcttcctaaattgattccgtaacatcctacctgattcaccaaaacatcctgattggctttgttttttacaacagttggcttgtctaagaaagtatgtgtatgacctccaataatcaaatcaatatcctgagtttgagcagccagttttaaatcacaaattttagattcatcatctttgtatttgtatccaaggtgtgacagacaaacaaccaaatcgcatttttcttctttctttaacaattgtgtcatatcctgtgcaatttctacaggattgttgtaaaccgtttctttatacatttgtttgtcaaccaggccggcaagctcgattcctaaaccaaagacacctactttaattccgtttttattgaaaattttatacggttttacaagaccgttcatcaccgtgtttttaaaatcgtaattcgagcagataaaatcaaaactagcgtgaggcatttgtgcatgtaatccgtcaagaccattgtcgaaatcgtggtttccaatagtcgatgcgtcgtacttcatcatactcatcagtttaaattccagttctcctccataataattaaagtagggagttccctgaaaaatatcgccggcatccagtaaaagcacatttggattttctttacgaatcgtttctataagtgcggctctgcgtgagacaccacctttgttcggattacgaggatcatcagccggaaatggatcaatatgactgtgaacatcgttagtatgtagaatggttaagtgtttgatatcgttattttcaaaactgctcaacgacaaacctaaacttaataaggcagtacttgcagctgttttttcgataaattctcttcttttcattttgtatgtttttgcgaaatgggatttttattcttctgtaattcggatgtcttttgctaccggaatcgtatcaacttctttaaagtaatcaattaatacatctctcagtttgtagttcagatcatatttttgaacactttttgcgaaaaaagacatactgtctccgccatttgccaaataatcatttgttgctacatagtaaattttattaagatcaagaggttttccctgaatcataatgttctttgcagtcttgtcttttgcaatagtaaaagtcatacctgataagggttgtgctttttgcgccttaatgatataggaagtcatctctaaaatctgatctccctttaaagccataaccaccatactgttttcaaaaggcatgatttcaaatgctgttctgttggttacatttcctttaggtaatatagctcggataccgccatgatttagtaagcacaaatcaatttttttcttctcccgtgcctcaaaaaccaggtttcctcttttaacacaaacgtcagccataagatttccaatgctggtttgccattttccggtacttttatcaagagtttccgggcaatacgccaaaacattgtccaaatccttgttgatgtgatcgcggtaaggcttaataaagttttcaattgcaggggtttcagttcctttttcagttatcggaagttgctttccttcaatttttgttagattataatttttctggctacaggaaaatataaaaaaaagtgttaagaatataacaaaaagtttcaaaaacccgttatacttttttagttttaccatcttaaatgctacttaaataattaattttgtaatctggtaaaagtactatgtttttaaattatataaaggaattttttgtaaaaaaatcattaaaaaataacctgaataatgtcaaaaacgaagtgtttacaagtaatgtgcaaacaattggtttactgattgatgaaagtagatttgatcattcagaagacctgataaaggagttggtctcgaaaggaattactcctgagaatatcaaaattgcagtgtacagaagtaaatttagcgagaaacaaacgtattcaagaccaacttttggacgaaaaagcgtcaattggaagggggaaattacagaaggtttcttaaatgaatttgtaaaaacagaatttgatcttttgattagttattatgatattgaaacggctgttttgatgctgataactgccaagtcaaaagcgaagtttaaagtaggattcgcatcagtagatgaaaaattaaatcgatggatgattgatactgctataaagaactacaaacttttcgtgcacgaattgtttagatatttaaagagtataaaataaaattataaagtagaatatgcaatcattaataggaactggtgttgcgcttgtaaccccatttaaaaaagacttttcagtagatatcgaagctttacagcgcatcgttaatttttcgatagacggtggtgttgaatatcttgtagttatgggaacaacggcagaaaatgctactctgacacaagccgaaaaagaactggtgattaaaacggttatagatactaataaaggaagactcccattagtacttggagttggtggaaataataccatgcaaattgtggaggaattaaaaacaggtgatttttctgcttttgaagctatactctctgtttctccttattataataagccaacacaagagggaatctatcagcattttaaagctattgcagaagcttctccaattcctgtgattttatataacgttccgggaagaacatccagtaacatgttgccgtcaacagtaattcgtttggcgaatgattttagtaatgtggtagcgattaaagaagctgccggagatatggctcaggctttacagttgattaaaaatgcaccagaaggttttctaattatctcaggagatgatatgattgctttgccaattgttttggcaggtggagcaggggtgatttcggttatcggacaaggttttccaaaagaatttacagaaatgattcgtttaggactcaataaaaaggtaactgaagcgtttaaaacacagtatcttttatctgattgtattgatatgatttttgagcagggaaatcctgccggaatcaaacaagtttttcaagcccttggtattgctgagaacacagtacgtttaccattagtggctgttgatgattcattagcaggcagattgaatgaatttgtgaaaaacagcataaaataagcatgagattgtcggtattttattagagtctgtttgggatttatttttgaggtttattaccaaagtattttcgagcgaaacaagacaagtttttatagaatagcagcgctattgtatgaaaaattaacgaagttgcagccgaaaattaggataagaaatccaataaataaaatttaaacaggctctgtaccaaaaaatattttgtagtagctaaattaataactaaatttgccaccgaaacttcggtgtgattttgctttggcacaattgtctaagaaatcataataaaagtaagaaaatgaaaaaaatagtatctctgttaattattgttgtccttttttgttcttgtagcgaataccaaaaggcattaaagaacgatgatgttgctgcaaaattcgaagttgcaacgaaaatgtacgatgcaggtaaatattcaaaagccattcgtctttttgaacaattggcatcttcttacagagggaaacctcaagcagagaaattattttacatgttctcacaatcgtattacaaaacaaagcaatattacttagcaggttaccagtttgaaagtttcgtttcaggttaccctagaagtgaaaaagttcaggaagctgcttttttaggagcgtacagctattctaaattagcgcctgcttatagcctggatcagacagacactgtaaaagccttagagaaattacaaacttttatcgaaagttacccaaattctgagtatatcgctcaggcaaacgaagctgtaaaagttttaaatggtaaactggagaaaaaagcatacgagaacgcgaaagggtacaatacaatttctgattacaaatcggcattaatcgcttttgataattttattgctgattttccgggaacaccgttaaaagaagacgcattgttttataaatacgattcggcatataaattagcaataaacagtattccttcaaaaatggaagagcgtttaaatgtggctaaagtagcttatggaaacttgattaagtttaatggtgctacgaagtataaaaaagaggcagatgaaatgaatgccagagtggaaacagatttacaaaaatttactaaataaaataaagtcatggatttaaaaaagacgaatgctcctgtaaatacaataacttacaataaaacagttattgaagagccaacaggaaatgtgtatgaagcaattaccattatggctaaaagagcaaatcaaattaactctgaaattaaaaaagaattgacagagaaattagaagagtttgctacttataatgacagtcttgaagaagtttttgaaaataaagaacaaatcgaagtttctaaattttacgaaaaattaccaaaacctcacgctttagcagttcaggagtggttagacggtaaaacataccacagaggttcaaacaaataatatagtataatgtcagttttaaacgggaagaaaattttactaggggtttctggtggaattgcagcctataaaacagcctcattagtacgactctttataaaagcaggtgcacatgtccaagtgataatgacacctgcttctaaggattttgtaactccacttaccttatctacactatcaaaaaatccggtacattccagtttctttaatcaggatgatgaagatgctgtctggaacaatcacgtggatctggctctttgggccgatttgatgctgattgcacctgcaacatccaataccttgtctaagatgacaacagggaatagtgataatcttttagtagctacttatttatcagccaaatgcccggtttattttgcgccggcaatggatttggatatgtacaaacacccttcagttttgtctagttttacggccttaaaaagttttggaaacattatgattccggctgaaagcggtgagttagccagcggtctgtccggagaaggaagaatggctgaacctgaaaatattattgcctttctggaagccgatttagaaagtaaattgcctttaaaaggaaaaaaaatactaattactgccggtccaacatacgaagcaatcgatcctgtgcgttttataggaaatcattcttcgggaaaaatgggttttgatctagcaaatgaagcagcaaacttaggtgctcaggttattttggttgcaggaccaacacattataaagctaaaaatggtttggtggaagtgatcaatgtagtttcggcacaagacatgtatgatgcctgtcatgagtactttaatgatgttgatgtggcaatcgctgcggccgcagtagccgattacagaccaaaagtagtcgctttacaaaagattaagaaagcggcagatgaattttcgattgaacttgaaaaaacaaaagatattctggcttcattaggagcgataaagaaaaatcagtttttaattggatttgcattggaaactgagaatgaaattgaaaatgcgaagctgaaaattcagaaaaaaaacttagatttgattgttctaaattccttacaggatgaaggagccggttttaaaaaagaaaccaataaagtaacctttattgatcaggattttaaaatcgaaccgatggaattgaaatcaaaagaatctgttgctgttgatattttaaataaagtggttttgcattttgcgaaatcataaagatttagagtaaacaaagcaataacaaggagagtaagtctgttatatgctgtaatcaaaataatatctttcgtatgaataaactagttacttttttagcatttttaatctttggcttcacacaagcacagcagctaaattgcactgtaactattaatacagaaagattacccaatcccaatcagcaagtgtttaaaacacttcagacttcgttgtcagagtttgtaaataaaacagattggacgggaacagtcttaaaacaaaatgagcgaatcaattgctcgatgtacataacactatcgtcaaacagttccgatcagttttcgggcactattcaggtgcagtcctcacgattgatttataattctacttattcttcaccaatattaaattacaacgacaaagattttaacttcaggtatattgaatacgagcctttgttgtttaatccgaccacgtttgagtctaatttagtatctgtagtttctttttacagttatttaattttagcgatggacgcagatagctttcaaatgggagcaggaagtcaatatcttgaaaccgctcagaatattgcaagtgtagcacaacaaggaggatcaaaaggctggagccagtcagacggagttcaaaaccgttattatttgattaccgatatgatttcgccaatgtacagcgatttacgtcaaaccatgttcatgtatcataacggcttagacggcatgagtcaggatttgaaagcatccaaagaaaaaatcaaatcagccttgatgcttaccggaaaattgaattcggtaaaacccaatgcctttttgaccagagtgttttttgatgccaaatcagacgaaattgtctccatattttctggaggaccaagtattccgattacagatctgaccgatgtgctgaataaagtatctccgttgaataccaccaaatggtcacagattaaattttaggccattttaattactctctttattaatttttatatttcccaaatttcctatgataacgtccttgtcgattaaaaactatgcacttattgaaaaattaactattgatttttcaaaaggtttttctattattactggtgagacaggtgcgggtaaatctattatattgggagcgataggattggttttaggaaaaagagccgatttaacttcactaaaaaataaagaagaaaaatgtgtgatcgaagcacagtttgaaatttctaaatacaacctgaaagatttttttatagcaaatgatctcgattatgaagaggagactattattagaagagaaattttgccttcaggaaaatcgcgtgcttttattaatgatagtccggtaaatttgcaggaattacaggatttaagcttgtttttgattgatattcattcacaacagcagactcaggagttatctgatgaaggagttcaatttaaaattattgatgctattgctaataatggagaagtgattcaatcgtatcaggatgttttgaaaggatataaatcagataagtccaaactaaatgctttgctgaaaaaacaaagtgattcaggaaaagagcaggaatacaatacctatttgttaaatgaattggttactgcaaaattaaaatcaggagagcaggaagaattggaggctgattttgaaaaactgaacaatgttgaaattattaaagaagctatggataaatcattggcaattgccaatgaagagcaatttggtgtttttcacagcctgaatgaaataaaaacagccttacaaaaaatagcacttttttctccggagtaccaaaatgtttttgaaaggattagcagtttggccattgaatttgatgatgtttcaaaagaattgcaaaatgcttctgaaaaacttttaaatgatcctgcacaattagaattggtgagccaaaaactccagttgatttataatttgcaaaaaaagcatcaggtaacttctgttgatgaattgcttggaatacaggcgacattagaaaattccctggtggaattggataatattggaggagaaattaccgctttgtcagaatcaatagcgcaaaaagttacagaattagacgcttttgcggcagctattcatcagaatagaatcaatgcaattccggttttgtcacaaaagttagttacaatattagaaacattgggaatgccaaatgtgcgtttcaatatggagcttttgtcttctgaaacttatttccaaaacggaaaagatgagttgcagtttttattctcagcaaataaaggaactgatttcggcttgctgaaaaaagtagcttcaggaggagaaatgtcacgtattatgctggcagttaaagcgattttagcacaatattcaaaacttccaaccttgatttttgatgagattgataccggagtttcaggagaaattgccattagaatgggagaaattatgaaagaaatgagtggtacaatgcaaatttttgccatcacccatttgcctcaaattgcagccaaaggagattcacactttaaagtctctaaatcaacggttgatgaggatacacaatcagaacttaagctattgtctcaggaagaaagagttaccgaaattgcgcagatgttatcgggtgcaaaaatctctgattcggcattaaatcatgcaaaagaattattaaattaaatatttaaattatatttgcttctataactattagaccaaaatcagaataaaatatgattaaaaaactatatgttttgtcttttatttgcttgtttattagcaaaataaatgctcaggatactgctgtaaaagaaggtacagaagtagctggtaaagaagttaaatcttatttagtaaaagactttcctgaaggtgtttataaaacatatgaagatttcattgcaaaaacgggaattttcatgggtgatgcgttagaaagacgcactattgtgggttataaatcaattgaaaaaagtgtagatgcatatcatgttttcttttgctggaaaagaaacaatgcaaaaatcacagattattttgctgttgtttacaatggtaacctgtatattcagcaaagatatttaatgaaatttgcatcaaaagaagatggaaatatgtctgctgataatccaaattcgtatcatagagttttaaacgacggaaagtttttgtatctcgaaggaccatttgctaatttgtggtctaaggcttttgcttataatggaggagcagttggtggagctattgcagccaatttgaatacgttaaaaggaatcgtttttaatgttgataagaaagaatttaacttcataagagagtgcgaaaatttaaatgcattgattgaagagtacaatggagttaaaattgaatgtaaagataaaaaagttgacattttaacggttagggaaaatgttgataaaattattaaatagtaaatatttgtctattttgttgaaatagaatatgttgtttagatcaaattaaattgaaataaaaaaagtatgattatagagcctagaatgagaggatttatttgcttgacagcccacccaaaaggtagcgagcaaaatgttaaaaatcaaatagaatatatcagatcaaaaggaccaattgctggtgcaaaaaaagtcttagttattggtgcttcaacaggtttcggattagcttcaagaattacaagtgcttttggatctgatgctgcaacaattggagtattttttgaaaaaccaccggttgaaggaaaaacagcttcaccaggatggtataattctgctgcatttgaaacagaagctcacaaagcaggtttatatgctaaaagtatcaacggagatgctttttcaaacgaaataaaaagacaaactttagatttaatcaaagccgacttaggtcaggttgatttggtaatctacagtttagcttctccggtgcgtcagcatccggttacaggagttttacaccgttcggttttaaaaccaatcggacaaacttttaccaataaaacagttgatttccacactggaaacgtttcggaagtttctattgctccggcaaatgaggatgatatcgcgaatacagttgctgtaatgggaggtgaagactggacgatgtggatggatgctttaaaagcagagaatttattggctgaaggtgctacaacagtagcttattcttatattggaccatcattaacagaagcagtttaccgtaaaggtacaattggtcgcgctaaagatgatttagaagcaacagcattctctattacagataatctgaaatctattggaggaaaagcctatgtttcggtaaacaaagctttggtaacacaggcaagttctgcaattccggttattccattgtatatttctcttttatataaaattatgaaagaagaagggatacacgaaggttgtatcgagcaaatccaacgtttgtttcaggatagattgtataacggaggagaagttcctgtagatgaaaaaggaagaatcagaatcgacgattgggaaatgcgcgaggatgtgcaggctaaagtggcgaaactttggttagaggctacaaccgaaacattacctcaaataggagatttagccggatatagaaatgacttcctgaatctatttggatttgaatttgctggtgtagactatgctgccgaagcgaatgaagttgtggaaattgaaagtatcaaataaaaaagaaaaaaatactactatataggaaaaccattcgttgcgacgaatggtttttttatgaatataacatatctttgttaaaattttgaaatttaaaatattgccactttaataccgcgtgatcgctatgattttttctttaattatacccgtgtataatcgtccggatgaagtagatgaacttttagaaagcttatctaaatccgattataatgaagcctttgaaattgttcttgtcgaagacggatcatcaataccttgtaaagatgtcgtgatgaactatcaaggcaaattgaatatatcgtattattttaaagaaaattcaggtccgggagattcgaggaactttggaatgcagaaggccagaggggattattttatcatttttgattcggattgtattattccggcaaactacctgacggaagttcgaaaagcgcttaatgagggttatgtggattgttttggagggccggataaagcattagatagtttttcggatattcagaaagccattaattttgcgatgacttcatttttaacgacgggaggaattcgtggtggatctgagaagatcaataaatttcagcccagaagttttaacatggggatttcaaagaaagcttttatagcttcaaaaggttttggaaacattcacccgggagaagatcctgatctttctattcgtttgtggaacctgggatttgaaaccagattgttcccggaagcgtatgtatatcataagcgaagaattgattgggaaaagttttcaattcaggtgaataaatttggaatcgcaagaccaatattaaacagttggtatccggaacataataagctgacattcttctttcctaccgtttttatactgggattattattagcctttttattgttaatttttaatattgatatcttattacaattatattttgtatatttcgtagtaatttttctaacagccgctattcagaataaaagcattaaaattggatatttatctgtaattgcagtatggaagcaattttatggttacggaactggatttctgaattcgtttctgaaagttattgttttaaagaaaaaaccccaggaggcttttcctaaaatgttttttaaaatataggtatggctaaaattattggcctgacaggtggaataggaagtggaaaaactactattgcaaactattttgcagaaatgggggtacccttgtatatcgccgatgatgaagccaaaaaagtaatgcagtctgaaaagattgtgaaacaaattaaacttgcttttggagactcgctctttgaaaatgatgttttaaacagagctaaattagccgagattgtttttaatgatgctgataaactggcaacattaaatgcaattgtacatccggcagttaaagaagacttcgagctttggttgttgaaaaataaaaaataccactatgtaatttacgaagctgcaattttgtttgaaagcggtcgttataaagattgtgatgttatagtaaccgttacagctcccgaagagatgagaattgaaagagttgttaagcgtgataaaaccacacgggagcaagttttaagtcggatgaaaatgcagtgggatgatgaaaaacgaatttctttaagcaattttgttattaataacagtaatcttaaaattgctagagaagaagttgttaaaattcttaaaattttaaatataaaacaaaatcagtcttaaatgttaatatttggttaatgtattatttttcatattcatttttagaaactttggtaatagttccgtctacaattagatccgcttttaatatagcaattggatatggtaattcatttttcttgtaaccataatttaacgttggtattaaaagtaaaagtagaccgataaatagtttcataaaagtattattttctactaaaatagtattttttgttgtactaaataaagtcgaagtttggagagtaaatttcgggtttcaggtttcaggttacctcacacaacttgaaacttgaaacctgaaacttgaaatctgaaactaaactttttacttctgacgctttttcagaacatcaacaacatcattaagctgatagcctttggcttgtaataagataaggtaatgaaaaagtaaatcggcgctttcgctaagaaataaatcatcgttattgtctttagcttcaataacgacttcaacggcctcttcaccgactttttgggctattttgttaattcctttttcgaatagtgaagcgacataacttttttctgaatcagcattttcccttcgggtcttgatagtactttctaaggtagaaatgaaaccgtagttttctttgttttcttcctgccagcaggtgtctgctcctgtgtgacaggttggtcctacagggtttgcctggattaaaagtgtatctccatcgcagtcatttttaatgcttaccagacttaaaaagttaccgctctcctcgccttttgtccacaatctttgtttggatcggctgaaaaaggttactttttgtgtttctattgttttttgaagtgattcttcgttcatatatcccagcatcagtacattcctggtttctgcatcctgaatgattgccggaattaatccgtgtgcacttttaatatctacgttcatagttattttagattttagatttcagattttagattgctgaattcttttggttttttaattatatcctgccctttttattttagactttagagatcagattgtagattaccagaatcttttttttctttagtctattctctttgttctattctctgtgctctaaactctgacttcaacaccattattcctaagctcttgcttcaaagtcttaatctcaatctctttaaagtgaaaaacacttgcggctaaggctgcatcggctttgcctttcttaaatgaatcgacaaaatgctgaatatttcctgcgccacctgaggcaattatcggaatattaacgagtgctgaaagtttagcgagtgcctcattcgcaaatccgtttttagtaccgtcattgtccatcgaagtaaataatatctctcctgctccacgtgcagccacttcaactgcccaatcgaataagttgagttcggttggtacttttcctcctaccaaatgtacgatccattgttcgttaatttgtttggcatcgatagcgacgaccacgcactgacttccaaatttctgagccaattcattaattaattgtggattcttgactgccgaggaattgatcgaaactttatctgcgccgttgttcagtaaaatttcaacatcttcaacgcttgaaattccacctccgacagtaaatggaatattgatcttctctgcgacatttcgaaccatagtaacaagcgttttacggcgttcttcagtggctgaaatatccagaaaaaccagttcatcggcaccttctgctgaatacagttctgccaactcaacaggatcccctgcatcacggagatcaacgaaattaaccccttttacggttctcccattttttatatccaaacagggtatgattctttttgctaacatttctttaatgtgttaatgagggaattggtaaatgtgataattagtcaattagataatttcttttttacgattgtttttgaattatcaaattatctaattttctcattttccaattatctcattttcgaattataaaattctctaattgttttaagctaatgcgcccttcgtagattgcttttccaatgattgttccttcacagcccagttcggctaatttaggtaattcatcgaatgttgaaattccgcctgatgcgatcaatttaatttcgacttcgctcgatttgacattacagttttttaaaattttgccgtacaaatcaaaacttgggccttctaacattccgtctttggcgatatcggtacaaataacgtattgaattcctttgctttgatactcctgaatgaacggaatcaaatcttcgtctgaattttctaaccagcccgaaacggcaattttttcgtctttggcgtcagcgcccagtataattttctcagaaccatattgagagatccatttttggaatatttctttattttttacagcaatacttccgcctgtaatttggtttgccccactttcaaaagcaattcttaaatcctcatctgattttaaaccgcctccaaaatcaattcgtaagctggtttgtgtcgcaatttgctctaagattttgtaattgacaattttacttgactttgcaccgtctaaatctactaaatgcaggtattcgattccatgagcttcaaatgatttggcaacttcgataggattttcattgtaaattattttagtgtcgtaatcgcctttcgataagcgaacacattttccgtcgataatgtctatggcgggtattattctcatttttctaaattttagatttctgattttagattttagattttcttacgtggttggaatttggaatttattctttgttatttagtttaagaaagttttcaaggattttctccccaatatcaccactcttttcggggtgaaattgggttccgtaaaaattatctttttgtaatgccgatgcgtactctgtgtcataatttgttgttgcgatcatatattggcaatttggtgcataaaagctgtgtaccaaatacataaattcattttcggcaatgtctttgaacagatcagattttagattataaatctgattccaccccatttgtggtacttttacattagacgaaaattttatgacgtctacgttaaaaattcctaaaccttgagtatttccttcttccgtagcattacacattaattgcattccgaggcagatccctaaaacaggctgttttaagttcggtatcaaacaatccaaaccgctttctttcagtttagtcattgccgaacttgcttctcctactcccggaaaaattactttgtcggccttttgaatttcatcagggtcattgctcaaaaccgctttaaaaccaagtctttccactgcaaacatgatgctctgaatgtttcctgcaccgtagtttatgattactattttcattaataaaagctttatgctttaagccttaagctttaggcttattgcctattgcttatagcttatagcgatttacaacattccctttgttgaaggtaaaatcattttttccgtatctcttttcactgccacttttatcgcttttgcgaaagctttaaaaattgcctcgattttgtgatgctcattcgttccttcagctttgatgttgatgtttgcttttgcaccatctgagaatgatttaaagaagtgaaaaaacatttctgttggcattttacctaccatttcgcgtttgaattcggtttcccaaaccagccagtttcttccgccaaagtcgattgcgacctgtgccaggcaatcgtccataggcaaacaaaagccataacgttcgattcccagtttattccctagtgctttggcgaaaacttctcccaaagcaattgccgtatcttcaatggtgtggtgttcatctacttccagatcacctttaaccaatatttctaaatccatttggccgtggcgggaaatttgatctaacatatggtcaaaaaatgcaattccggtttcgattttactttttcccgttccatccagatttaaattaataaaaatgtctgtttcattcgttttacgtgtaatcgaggctgaacgtgcttctagctttaaaaactcatagatcgttttccaattcattgtctgaagcacaatcgtttggtctaattcttcccgtttagaagaaatttcattgctcccgattccgtcattatcattgataaaaatagccttcgctcctagatttttagctaattcaacatccgtcaaacgatctcctaaaacaaaagaattttctaaatcatattccgggttatcgatgtattgtgtcagcatcccggttcttggctttcttgttggggcattatcttccggaaaagatctgtcgatgaaaattgcatcaaatttaattccttcattctcaaaagcttttaagatgaaattttgtgttggccaaaacgtttcttccggaaaactatccgttcccagaccgtcctgattggtaaccattaccaattcgtaatctaattcgttggcaattttagctaagtattgaaaagcttttggataaaattctactttctccaaagcatctaattggtaattttcaggttctaaaacaatcgttccgtcacgatcgataaaaagtacttttttcatagtttatatttttgttttgccacagattatatagattataatgatttttttattccttgtgtttattttttcgccacgaattcacgaattaaaacgaattgaattagtgaaaattcgagaaatttgtggcaaaataaaaattcttttaatctatataatctgtggcaagaaaactttgcgtacttcgcgtaattctttgcgagctttgcggttaagttttatttcaataatttcaattctttaatcaaaacagcattttcttccggaatcccaatcgtcaaacgaaggcagttttcacataaaggttggctggttctgtttcggattacgattcccttttcaattaactgattgtatcttttattggcatcgtctacttttaccaaaacaaaattagcttctgttgggtatactttttctacaaaatcaacctcaagtaaaactttaattagctcttctctttgttcgataattgaagctatttcagtttttattttttcaggatcattcaaacgacttatagctctctgctgggttaattcgtttacgttatatggaggttttattttgttgagaaccgaaatcacagcttcggacgcataacaaattcctaatcggattcctgctagtccgtaggcttttgaaagggtttgcgtgatgatcaagtttggatattcgtctatctctgtcaaccagctttccttttttgaaaagtcaatataagcctcgtcaatcaccactaaacctttaaagttttgaagtagttttacaacgctctcgtctgagaatgaatttcccgtgggattgtttggagagcataaaaagataattttcgtagaatcgtcaacagcatctaagatttgatctacttgtggctgaaaatcggttgaaagtaaaacttctctgttctcgacggcattaatatctgccaaaacgctgtacatcccataagttggcggaagcgaaataatattgtctgttttaggttcacagaaagctctgaatagtaaatcgagaacttcatcacttccgtttcctaataaaatctggcttgcttttaccttattattcttcgctaaaatggctttgaccgaaagttgttgtggatcagggtaacgatttactccagtctgaaacggattttcattcgcatccaaaaaaatcatgtcggcagtatcaaagtcttcaaactcatcacgtgctgaagaataaggtttcaaagattttacattctctcttgttatcgtgtttatatcgaatttcattttttttgttttttttctttagagaatggataatagagtcaagagtcaagatggtagacttttttgtctgatcagtaactactttgtcctttatttctatgctctatactctatattcttgcttctatattcctgactcttgcctctatcctctttccttcaaactctttaatcgcaatgtaactgcattcttgtgagcttgtaatccttcagcttcagccataatctcgatagcactgccaattttctgaattccttctttagatattttctgaaaggtcattgatttaacaaaactgtccaggtttacgccgctgtaatttttagcatagccgtttgttggtaaagtatgattagttcctgacgcatagtctcctgcactttcaggggtgtaattgcctataaacacagaacctgcgttgataattccgttacagtagaaatcatcatattgtgagcaaattataaaatgttccggtccatactcgttaattaaatctaaagcgatttgatcgttttctacataaattagttttgagttttcaatggctttcttggcaattgcttttcggggaagttcttcaatttgaatctggatctccttttcaacggcttgaattaatcttttagaagtcgaaaccaaaataacctgactgtctgttccgtgttctgcctgagacagtaaatcggaggcaacaaatgctggtacagcagtatcatcagccacaaccaacaattctgaaggtccggcaggcatatcgatggctactccaaattgagttgccaactgttttgccacagttacaaattgatttccgggtccaaaaattttatatactttagggattgactttgttccgaatgtcattccggcaatggcctgaatccctcccacttttaagattttggttacaccgcataaagtagctgcatatagaattgcagggtttattttcccggatttatcaggcggagaacatagtactatttctttacagcctgcaattccggcaggaacagccaacattagaacagttgaaaacaaaggtgctgttcctcccggaatgtataagccaattttttgaatcggtctcttttcctgccagcagttgactccctcagtcgtttcaatcgagatcttatcggttttttgagcgctgtgaaatttatatatgttttcttttgctaacagaatagccgcttttagttcctctgaaatgctactattggcttcctgaatctcttcagatgaaacttcatagttttccagagcaattccgtcaaaaattgaagtgtatttagcaacagcttcatctccttttttctgtacttctttaaaaatttcctttactgtaacttcgatatcatcgatcgttttagttggtcgttttagtatttctgaccaggtatctggtttcggattgtttattttattcattttttttaatgctttaggctttaagctttaggctataagcagttttgttttttctttaatctgtcagcatatagcttaaagcttattgcttacagcgcacgaagtgcatttaaagaaccattttctcaattggacacactaagattccttctgctccttcctcttttaattggtcaattacatcccaaaaggtgtctttatcaattaccgagtgaacgctgctccatccttcctgtgcaagcggcaaaacggtaaggcttcgaagcaccggcagaatttttccaattgcttcgattttatcgttaggtacgttcattaggatgtatttggagtttctagctcttaaaacggactggattctgaattttaaagtatcaatgtgtttttgaatttcgggtgatacttttggtgaaacagcgagaacagcttcacttttaagaattacttcaacctcttttaaattgtttttgaataaggtgcttccgcttgaaacaatatcaacaatggcatctgcaagtccgatattaggagcaatttctacagagcccgaaatttggtgaatatcgactgtcagtccaaaagaattaaaatactcatttacggtattaggatatgaggttgcaacacgcaaacctgataaatcctgtatcgaattgtattcaaaggttttgggaactgcaacagaaactttacacttagaaaaacccagtttttgaattacttcgatttgtcggcctttctccacaagtaaattatcaccaacgatagcaagatctaccactccatcaattaaatactgcggaatgtctgagtttcgaaggtataaaacttctaagggaaagttggaagcttcggctttaagctgatcgtttccgttgttgattgaaataccacaatctttaagaatttgaatgctgtcttcgtttaatcgacctgatttttgaattgcaatttttaatgtactcatttttttagttttttagaattaaatagtctgagtacaaagaagtggtataaaaaaacccgtttgatgtactcaaacgggttttaaaatatgatgatttacacgcataccattaacacatcgcctgagagcaataatgaaaatgatgatgatgtaattgattagaaatcatgtcttgttttgttttttaattctttgattcggttgcaaatatagtagttattttcataaaaaagcattttttattttaacttaatggtgttttattgttaaaaaatctttcaaggcttggttttacaggtctttcagaatctacaatagtgcttttttattttgatcaaagtataaaattacggtagtacctacccctatttcgctttccattttaaacttgatatgaagtaattcagttaccctttttacgatggaaagccctaatccggttcctttaatttccggatgttctgtagaattggatctgaagaagggactaaaaatagcgtctaaatcttgctttgcaataccaataccgttatccgaaattctgcagattgtcttttcattttcttcggagagcagaacagttacctctcctccactgtgtgaatatttaatagcattcgaaattatatttctgagtatggtaatgactaaaaaattatccgactcaatatagtaatcctgacgagtatcaaatttaattttgatctgctgattgttaattctttcggagtttaatctgaaaacgtctaaaattatagcatttagataaacagattctgtattgatatttttcttctgattttcaaaacgagccatcaacaacagttgatctacaagcatattcagatggtcgacttcttttatgcaatagttaattttatcttcgtattccttattgtctcgaggtttacgaattaacacttcaagtgttcctttaataacagtaagaggtgttctgagttcatgagaagcatcagaggtaaactctttttcgcgttcaattgcatgttcaattcggtttaaaagattgtttatcgttttcgagagcgtgtacaattcatccttagttctcggcaatgcgatacgtgcctttaaattgtctttggtgatgatttttgaggtattaatgatttcattgatgggttttatacttcgtcccgcaaagaatctggcaatgaaaaataacaggatcaaaatccctaaaaaagaaagtgacatgatatcaaacaggttgttcagtaccattttagaatcggccagggacatggcaacaatcacatatccaattttcttttccttaagatgaagcggaacctgaatttgccggatcgcatggtctcccattttagtgtcaaagagttcaaaatcttcaacagaatcattaaatggaagagtttgggtttttagattcggcgctttttcaatgatttttttattcagatcaaggaactctacaaaaaccggatttacatctaccgtgttgtgctctctttcgttccattcttcttcatcaattaaaattacctttcccttaacctctttaatttcctggaggtgattttgaatttcaacttttaatttttcatcgatatgactgtaaaccgtatgttttacaatagaataaatgacggagaaaacggctaaaattaataatcccgttgtaatgatataatttaaagcaattctgtttttaaaagaaagttgtgtcatttataaatcgtttgcaatatatccgataccgcgtatcgttttaatataatcttcttcaatttttaaattgagtttttttctgatggcattcataaaaacatcgattacaccagtgtcgtattcgaagtttatttcccaaacatcttttaatatttgatttcgtgtgcagacttttcccttgttctgaataagatattttaagagttcgaattctctttgggtcagtgcaacttcgccattgttttttagaacagtatgctttaacaaatctattttgatagttcccaaagtcaaatcttctgatcctttttgatttctaaagtgtattttgatgcgttccaccaattcctcaaagctaaaaggttttttaatgtagtcatttgctcctgcttttaggccttctattgtttcctgtacagtatctttagcggtcaaaaagataattggggttttctgatctttaactctaatggctctgcacaaatctaatccgttaattttaggaagcatccagtctaataaaatcaaatcaaagtgttggctgtgaatcagctcaaaagctttagagccatcattggctgtcgtaatctggtatccttcttcctgcagaccttgttgcaaaaactgaacaatacctaactcatcttcaacgattagaatgtgcattataatagtgtaattttagttaaactgtaattatataccttcaaagataagacttttgaggtcagaaaggatttaataccattagaatagccgaaaattaacctgcttaagtaaaccttaagttaacactaagaaaggcaaaagcataactttattctgaattagtttaatgggattatttttgcttgaaacagaagtcaaaattggtactattctcatatttgactataaaagagactaatcgttgtttatccttaaaaaaagtatgttatttttactaattttacaatattaagcaaacgaataactcttttaaattaataatttctgaacttaaaaagctattaatgtctctttcaaaaaagttttccccaatttacaatttggcgatattttattttatcgttagttttctgttaagaattgttttgttttttcatcctataacacaaagttcatttaccattattcaaagcttaaaaatctttgtcctggggcttatttctgatttttttgtttttgttgtggcaagtgtttttttatggctttatctaattttcatatccaattctaagtataataaaccttccggttatataattcttgggatttttgcagttctttttatctatgcagcttccggaaaaagtgtctttgacgagtatggaggtgctttgccaatgattgttatgatttttatcggaattaagatggctctctttgcacttttgttgtttcttcctaagttaagagataaaatcagatattggttgtttgcatttgtaatgttcctgtatgttttactaattctgcaaaatggtttaagtgaatatttcttttggaatgagtttggtgtgaagtataattttattgcggtaaattatttgatttacactactgaggttataggaaatattatggagtcctatcccgttattcctttgttctcggctttatttttagtgactggaattgtgacttactttattgttaaaaagtccagaaactatattgaccatattccgactataagtgagaaactaaaaattacggctatctatcttggagcatttgctgtttcactaattgcgattccaacgttggcaaaaacggaaaattcaaagaatgtttttgttaacgaattacaggctaacggtatctataaattttacttagcatttgtgaacagtaagcttgattactttgatttttataaaacgttacctaatgaagaggcttttgcgatactaaaacaacagttcgctactattaaaggaaacagtactaaaagaactatcaccggagattcgcttgaaaatcataaaaatgtggttctgattactattgaaagttatagtgccgattttatgaagatgtatggaaatgaggaaaatattactccttttttagatagtttggctcaaaagagtcttctctttaccaatttgtatgctaccggaaacagaacagttcgcggactggaagcggttactttatgcttgcctccaactgccggtgaaagtgttgtgaaaagagaagataataagaacaaattttctaccggagctgtttttaagcaaaaaggatataaggtgaaatatttgtatggtggagatgctttctttgataatatgcaggatttcttttccggaaatggttatgaaattgtagacaagtcaagttttgcacctgaagaaattactttctccaatgtttggggtgtttgtgatgaagatatgtaccataaagcgataaaggttatgaatgctgagaaaaaggaaaacaagcctttctttaatcatattatgacggtgagtaaccacagaccttttacgtatccaaataataaaattgatattccgggtgatgcaaaatctcgtgaaggtggtgtaaaatatacagattattcgttgaaaagattttttgcaatggcaagcaaacaatcttggtttaagaataccatttttgttattgtagccgaccattgtgcctcaagtgcaggaaaaactgagcttcctttagataagtatagaattccggggtttatttatgatccgaatggaaaacctcaaaaatacaatcagttaatgtcgcaaatagatgttatgccaacgctctttggattattaaattttaattacgaaagtaagtttttcggtcaggacgttttagaaccggattataaaccaagagcttttatcgctacttatcaggacatgggactactaaaagacaatgttttgacgattttgtcgcctaagcagcaggtaaaacagtttaatgtgcaaattaatccgaaaccgggtattgctcctgaatttcagattgattacaacgaaactccgatgaaaacagagagagctgatctggtaaaagaaaccatttctttttatcaaacagcttcctatatgcttaaagagaagaagtatcagcgttagttttcagtctcagtattcagtctcagtattcagtctcagtattcagtctcagtattcagtctcagtattcagtctcagtattcagtctcagtattcagtctcagtattcagtctcagtattcagtctcagtcnnnnnnnnnnnnnnnnnnnnnnnnnnnnnnnnnnnnnnnnnnnnnnnnnnnnnnnnnnnnnnnnnnnnnnnnnnnnnnnnnnnnnnnnnnnnnnnnnnattcagtctcagtattcagtctcagtattcagtctcagtattcagtctcagtattcagtctcagtattcagtctcagtcgcggtctcagtttgaatattacttactgttgcggtattgatcgtaaatgaagtctttgggaaaaactatataacaaagactaaaataaaaatagcctcaagttcattagaatttgaggctatttttattttaataaattagttgcaatctgtaaactaaacgcagttcaaagacgatgactgctactgaatactgagactgtaaactaatttaatcattctgatttttcattccaaataagtttccttgttgaaataatctggcgtcatcttttaaagcttgattgtttctttgtgtcagctcaaatgcatctaaatcacttaaatcaggttttcctgcatttacccatgctgtataccagaagcttgctgttgctgcaatggctttcttcatttgattctccaccattccgtttaattctttgtgcagttttttagcatattcgtcagagaaaacagctgtgttgtatttgctctttagtactttcccttcagcatccaatttaaaagtctcattttccggagttgttgttcttagctttttatccacatccagcaaaggctgaactaaactgtgagtatcattaatcatatcccaagttgctttgtgaacatcctcatagtactgtgcttgcggaacgtttagtctgtagtttttaacaaataattcaggaagtctgctttcccaaagtgaatgaattcccttttgatcgcttaattgtccgtcatgatttgaagaagtatgcaatggcatgtgtgcatcaccaacgtaatgacctaaatctgctgctaaaaacaagatttcagctctgttcttctctttaaaagcttttgttagttttaccatcatctcttcgatataccaaggcaggattccgttctcgtttaagaatttggcatcgtacttttgctttgctgcttctaaagtctgtgggaaatctgctgggttaccaaaactctccatgtcaaaataatgtctaggattttcgtctttataatttaaggcatattttcgaatgtccggtacagaggcttcctgtgtaataaaatctatatgattatagaagaatacctgaagcgggtgtggcaaagccataactgcggctttattaatacgttcgtgacccaccatcccccaggataatgtcaaaaaaccaattgctaatgcgaataatgcaattagtcttggtttcatttttaagtttttcatttttatttttgttagaggtgcaaatttattttatttatgtacatttcaaagtgaataatcgtaaagattgcaaaattagcttcatttatttttttttgaatccgaagtaattgaaattcaaattaaaagtttcttcgtaaattcgttactttttatctaaatctaaaaatatgcgcctgatttctataggaattcttttcctgctctacacttccagcagttttgcacaagaagatattgtcgaattgaagaatgttcaagatacgattctgaataccaaaagaacattacaggtcgcggatccgttcaattcggtgaaaacgatgcagcaattgtttccgggtaaaatatacaatctctccgaccataatacttttataagttggaaatgcagcaaatgcaaacctaccgcctatattgatgtcaatggtgtcgaaggcgatcagttgtttccttatgaaaatggcgttgccaccagggttttgggtactcttgattatacagattccaaagggaatcagtttaaattgctgctttttaaccattctttttacgacgaagacgggctgcagactgggcgattttctggtggacttgttggcgttgctaagtttgcaaaaaatgataagatatggcaaatgaggtcttttcagcctgctgtagcggcgtttggttcattttctcaggcaccttctccaaaattgatagaaattggagaagatcagttcgcctttacactcacccatgtaaatggtggtgcgggcggtccatttgaggggattctctatctgattgccggatttgacggaaggtatcagcctattttagagtcttacaattataaactcaccaatgtggcgagcgtagaatggtccggttcttatacggtcgtaaagaatacaaagaaaaaacactttaaggatattatcgttaaaacaaacggttcctttagtaaagctgctcaggctaatgatgaatttgaagtcgttttacctgatgaaattgctgcaatggccaaaactaaaaagaagtttaatttcgagatcgaaagacgttattcgtttaaaggaaaacagtataagctgatggataagcctgttgttaaattcttgaatgtgaaatagctatttctttttagtggaaaaatagtatcgatacaagccccagaaccgcaataaatatccaaagaacaactccttgtagtaaaggtttaattccaactgattttaaagtattgatacttaatgtagctcctatcaggaataaagttatcgtaagaccgattttggcaatcgaaacaataggtggtgccaggacagccgtttgaggtacataagtattgaaaagcatggcgagaatgaataaacctatgaaatacggaatcttgattttagagtttttattcttaaaaagcagagcagttaagagagagatcggtataatccataaggctctggctaatttcaccgtagttgcaatctgtagtgcttctgtaccatatttattggctgctcctacgacagaactcgtgtcgtgaatggctatggcacaccataatccaaagtctttttgtgacaagtcgagttgatgtccgataaaggggaaaacaaacaatgctacggagttcagaataaaaataacccccagagcgattgaggtctgattttcattagatttaattactggtgcaatggccgcaatggcgcttcctccgcaaatagctgttccacaagaaattaaatgagaggtttttttctcggtttttaaccatttccctaagaaagttcccaaaattaaagtgctgaaaatggataatatagtaagtaagaatccttcttttccggcagagagcgctgcagtcgcattcattccgaagcctaaacctaccactgaaaattgaagtaaaaaagtaatcgctactgcattgaacttttcaaatggatttccaaagacatttaccagaattacccctaataataaagcaattggaggtgaaatgattgaaaataagcatagaacaatgataaaagcaaaaattgcctgttgcaggtagggattaatttcaaaaaaatgtaccgatgtttgttgttttgttttcaaaataagtaatttgatatttcttctacaaaggtccgtcgtttgtatcaatattaccaatcgtaaaacgcgattggctataactctaagttataataagaagacaaattttggataaaaagctcggttaatgcatttggtttacccagtaaagtaatgatgtagaagtagcgttcaacagataagttagcgatatcaagtatcattaattcattgtttttaagttgcttacctactgcgtgaatggacataaaagccaggcaatccgaatttaggagatatgatttgatgctttcggtacttcctaactgcatttcgatttgcagatcacttatttttatcccaacttgtttcaaagagtattctataacttcaagtgttccagatccacgctcacgggtgataaatttcatcgatttcagatcttctaatgaaatttcattttgtttgatcagcggatttttggtattgcacaccagtaccagttcgtcttttaaaaacggagtgtattttattgattgatttttggattgtccttcgacaattccaatttcgatttctttatggattaaggcattctcaatttgttctgtatttccgttgagcaaattgactttgatgtctttctccttttgatgaaaacgtgctagcaccggtgaaataatatattgagaaatggttgtactcgctcccagcctcagtaatccttgacgatcgttaataaaactgctcatttcgaagtctatttcacgatagatttcaaagatgtttttggtgtgtttcagcagaatttctcctgccggagttaaagcaattttggaaccgtttcgttcgaaaagcttagttttataagcttcttcaagttcctgaatatgtttggaaaccgctggctgtgaaatatataattcagttgccgctttagtaaagttaaggcggagtgaaacggtgtagaatacttttagcctgaaatccatttgctttagtttttagttattctgtttcaagtttcaagttttacggtttacctatggcttttaaatgattggttaaagcaacccgttgtatttcctgataaaccattctgcagtaaataccaaagcaattaaaattaacagccaaacccaatcaatcaatggtgttttggtagaaacatttttttcaatcgatttgtattctttattctctaaaagctgttgaattaaatcatctgactgattttcaaagaaagcttttccgttggtttgcaaggctaattgctttaatttctgaacatccggatttacaaactgcttctcgatatcaaaatctaaaatttcaaagtgacctgaataagaagtattggtgttcaattcttttacggtaaagttatattttccagttgaaagtccatccaggtttacggaaaaagagttgtttccttttaacaaatcgtagttttttacctgtttggttgctgcatttgttacggtaatcgtaagtcttgctttttcatcaaactcatagtttttattaaagtactgcgcattgattacaatagcttcaccggaattgtagaagctttcgtgtgtaactaccaaagattttttggaagtagttgaagccagatactgaataaccttatctataaaaacgtcatacttctcaaaagactgattgtcaatatggctttgtaaacgccatttccagctgttttctcctaaaagaaaagcagttctttttgcctgactctctgtaaaggccagtaatggtgcatttgtcgaaacatttcttatttttgaagaaagcagtactgatacatttccattcgttgtcaccgttccgaataaattttgcagtggcggaaaattttcaaaacctatattgtctacagcaaacagattaaactgcgattcaaattctgccagataatcttctctctgaccactcattttaaagaccagatttttttgctgctgattcaaataattaaagtcagtgttgttgcccgttatgataaaagtatttactccggcaagcttattgttatcgaaaatggccttgaatgctgtcgttggctggtataaaaccaaaacagaagcttcttgtagctgattgatatcgtttggcttaaccagaatcactttacgctgggcattggtttcaatcgaacgttttaaggctgcaatatcgggatgatttatggcagaaacgattgcaaccgttgacttttgatcaatgatttcgacagcaaaatttttgatattattatagctgtttttctctttgatattggaagaaactgctgccttaaaaatttgtaggcctactttatctgctggtaaaagcaagtttaaggttgctgtttttttagagggagaaaaagaaactttttctttggcaacgaccttccctccttgtgatattgtaaaatcagcattcgtggctttgtctccagcgtattgaagaaatacttctaccggaaatttattcttgtgaaaagcgtatttgtttacgttaagctgattgattttaagatctaaaaaagtggttgtatctcccacaaccaagggataaactttattgacaggatcaaaacgatagacataatcgtttcctgtagtctgatttccgtcagttataattacagttggaaaaatcaggtttttattgatgctttttaggtttttggcaacttcgtcaagattggtttgttttcctttgaaatcaaacttctccgaaggtttaaaatcggcatcaaactggtaggactgaatttcgaatttatcccgaagagcaggattcgacgtcaatttttgatgcaactctattacttttttatttgaatttaaagcagtaatagaacttgaattgtctacagcaattgcaagtggagttttggtaacttccagtgcatttttggtcattattggatttattagtagaagcaataatccaaaaatggctaaaaaacgtaaaaaagccaaaaaccaaatcacattggatttgtttttggctttaaaaaaatattgaaaatacgacaaaccaactgcgattactaaagaaagtaatattaatagaatcgtgtttgtagtcatatattattttgtttatggtttagagttttttgtttatagtttatggctgcagaacaataaacaacaaaccatcaacaatcaacttattaggtaagcattcctccacaaacattaagtacttgtcctgtgacatacgcacttaagtctgaagctaagaaaagacaagcgttagcaacatcttctgcgcttcctcctctttttaatggaattccttctctccatccttttactacatcttcgtttaattttgcagtcatctccgtttcaatgaaacctggcgcgattgcattgcaacgaatgttacgggaacctaactctaatgctacagatttagtaaagccaattgcacccgcttttgaagcggcatagttagtttgccctgcgtttcctgaaactcctactactgagctgatatttatgatagatcctgaacgttgtttcaaaaaggttttttgaattgcttttgtcatattaaagacagatttcaggtttacatcaataacctgatcaaaatctgcttcagacatacgcattaacaggttgtcttttgtaattccggcattgttaattaagatatctacggttccgaaatcagctaaaactgcatcaacaaaagtttgtgcttcattaaaatcggcagcatttgattggtatccttttgctttaattcctaaaccgttcaattcagcttctaaagcttctgcagaagctacagatgagctgtatgtaaaagcaacgtttgcgccatgtttagcaaaaacttcagcaattcctcttccaattccacgactagcgcccgtaataatggcaacttttccttctagtaatttcatattcaaaattaatgttaatattatttccagctaatgagctatttactttctcttgaaaaaagagtaaaaaacagtgctgtgaatgacttgtcaaatatatgataattccctttttaaaaaaattaagtcacggcataatttaggattaagaatgattctttactaataatcataaaaaaaccgtttcaaattatgaaacggtttttcttaatctataaaaaaatggactaacaagtgaagatttatctctcttagttttcaaaagaaatgcagtgtaatcagtggtgttaacatctgaaaattaataattaacgcaaagaaagagactgcttttagttaggtgttttgtcttaaaagtcatttattcaattattagtatgggttgaatatcattttttaaagacgacacatcttaaaaactactcacaaatcacgccatctattgttgctctgcatattggttctaccggttgttcaggagggagcataatacatggtccgttataaggaaaaggtgtccatggaatagtacatcttactccaccgcttccgtttactctttttagttcttctttgcctagtacttcaactcctgagaaatttaaaatagtttttaacatcataaaattggttatttaacagttgattatctcaatcattttttgtccgttgagtttcagacctaaagatattcttaaattacatattagtttggtttctaaatcaagtaaaacgagttgttctgatttctcacttaaaaaagcagcccgttagggctgcctcaactcaaaataaaaataaaataaaataaaataaagacaaaacgcattgtagtttgtagctgctctttctaaaagactacaatgcatttttttaggttcgacttaaagcagccaggttgtcattctaaatgaacttgacgcactagtaaacgtataaactgtattggtatatcctaacttgaagttttcttttttgacaaaaacaccagtggtattgacaagatttttatcaaaactagccaagaatgctggagctgcagcagttgtgtttccattccaagacttatgttttagaatgatcttttggtttggtgcgtcttccacaacatctatgtagtgaaaaattgcaggctgaccacctgcgaacgtataataaatgaaatttccaagcgagtgattcaagtaaagctgaacggatgctatggttacacctttaggtaagcttgcgttaatttttgctaactcatttataaacaattgtgagtttgttgatgcatcctctgtataatcatcaacaaagtatcccaatctggcagaaatcttccccggaagcagtatcttataatcatctgttaaccttggtgggacattgctaaatttaagagttgcacttactcctccagttcctgttgcaacaaaattattagtagcggtatcatacacaaaattagttagtttttgaccttttactgtaagtgccggttttactgtagctcccgttggtgtaaaagccaaagctaaattctgaacgtcatttgatcctgtcaataaagatgttgccactccaaaacgcgcagctgtattataatcaaaatcatagttttgaattgtagatccgtcattaatctgtaataatctataaagcggacttacttcatctcctgttatggcatttattattggcgtgtttttagctaaatctgtccaatcttttgctgtcgcttttacaaaacgaacttcgtgtccgtttctattggttctaaaaataatgtctccatttttttgtccataataaaagaattgaaaatctcctaaatatcctttggctaaaagtgccgctgttggagaattatttgcatcggacaaaagatgtattctgttttcggttgtaaaaactaaacttacagtgctaccgacctgaatttcgtactgacttttgtaagttcctgtcaggctattaaaatcggaggccatatctacttttccttctggaagaaatttaaataaatgtgtccacccccctaattgtgtgctgtctgtataataaactgctttccatccttctgaagatgaaagtaaaacatcgttcagctctttttgacgggaacttaatctttctgtagcatttttatcaaatttagcgtctacttctgtgcttgtacaagaccccagtaataaagctataaaagaaatcgctaaatacttatatatattttttgctttcataatatgatttttataaaatttattgtccttagttattaactacaacatcagtgtttttttgagcttcatctcttaaggcatagaaatctatattaaaagaatccttataatactttacaaccaatgcttcttttgctttaatatttgctttagcagtagcatcggtaacacccgccaaaatggcatcgtattctgcttttgaactggttaaaattgtagcggcagtttcggcaaaatcttcataaatgtttaatcttgcataactggttataaaacctaatgatcttgaagttgaaagtgcctctgtataccatgtagaagtataacctaccggagttaactttgaccaggcctgctcgtcaaatggcttagtctggtttaaaatatgcacatattcatgctgaatggtgtgaataaactgtgtaacattagctctgtttttcttattaagtttatctacctcaaatagcgtaactctttgaccggcttctgctaatcccagagttactgttccgttagtgtttaaattaacacctccaacaagtacaaattctctaggagcaattttctttacaaaattcactccgccaatcttggtgtaactgtccacccagattttctttaccacttccattgccggctgaactttatctacctgtggtgggaatagatatttagtattatcaactaaattttgattccactcataatatacatttatgttataagggtttaagaaagtggtcccaatccatttatctaaatctgtttttgacagtgctgaaaaatcaaattgactttcttttggctgcacttcatgagcacaagaagcaagaagtaaaacccctgccattagtgctattttatatgtttttactattttcatactatactttaattaaaaattatctaggatttttttcaataccattatctgaagccctaagcggaatttgtaatgctcttcgtttgtcgtctttctctaagacgttttttcgaattactttaccaaactcaagtgtattatgagttacaaccagattaaaacgtttgatatcaaaccatctaagtccttcacgtaaaaaatcttttcttcttgcctctgctaatgcttttatataggaagcctgaagtgggcttaaggtatagaacggagtaaactcatttgagattaccggatatttagcctgtactactgattcattgaatagatctgttgcagcattgtatcctgatgttctggttcctaaaaagtatcctaattcaatattagcttctgccatcctattcttcatgactaatgcttcaattctgttcagatacaactcgtcattgctaagtaaaacggtagcagtataaggctctccaataccagatgttaggtttgtaactttaaaatattcgtaaagtttaggaaccacaaccagtactccgctgtaatattgaccctgagctttaattaaatttggtttaccccacatattggtttgatttcctaatatttcatctgacttatttcctgcaagagcaaatcggtaagcacctgctctgtttgcaattgagttaggataagcaattaagagattggtttcttgctctgctttagagtattctaaaggcatttgagagaaaggaacagcattaaatgcaagataacttctaattttagttggtttagaaccaagtccttcagaaaattcaagaactttgtcccaatccccttttattaagtaaaaacgacatgccaaggctctggcagcatccctgttaaagtgaaacttaggttctttataatcattcgttacatattttaaaccttctataatgtcctgttctacaaaatcgaaaacttcttttactgtattacgtttgtattgtaccaataaggctgtttccggttttgtaatatacggaactcctaaatctgatccggctgttgcaggattgtaacgattcgcccataatgaaaccaatataaaatgagaataggctctcgcaatcaaagcctcccctttttgtggatttaaacttgttggactgcctaatttttcaatggcatccaatgcctgattggcagccgcgatagcttcgtacgatccgatccaaaatccattttcagtatctgttccgatctgattttgcatttcccaattatagctgttatcattgtttacattcgcagcctgttttaactctgagtcaaaaacattatcagacatagcttctgcaagtgcaaaataggaagcgttaggataggctgtaactaataattcggatattttttcaggcgtatctatctgtgttctgttatctggtacttctgaaaggaaatcatcacaactgctaaaaccaatcagcaatactagtgatagtgttatttttatatttttcataatcaattttagtattagaatgaaatatttattgcaaaagtatattgggctgtaatagggaaagctacccctccggtattacggaattcaggatcttgtccgtttaattttttatcggagtaaatcaaccatggattaactgcggatcctttaagagtaaagctgctaacacctaactttctcttaaaatcacttggaaattcccagccaagagaaatattctttaaccttacaaaatcaccgcttgcaattctaacatcagaaaaattataagtattgtaggcaatctgtaagtcgttctcaccataatttctattcaacaatcgatctgcaataactggtacattggtgaagttttcgtctcctggattgatccatctgttagcaaattcttttgtgaaaacagtctgatctgtgtaaacattattatacacaggattcaatctgattttatttcctcctgatcctacgatgaaaacatataatgaccagtttttgtaagtaaacgtattggcaagaccaatagatttatttggctcaacagatccttcgtattttaaatatttcattacattgttagtatcttgaaaattagcttctgtaatattattttcagcaccatcctgtaatttaaaagttggtaatccttcaggattcagacctgtaaactgataagaataaagggagtttctaggatgacctactgtgttacctccatttgaagctatcaaatcaaatactgctggtctgttggctaattttgtaattttttggtcataaacagaaaagtttaatgtggtagaccatttaaaatctttagcagcaatattctgagtagtaaaaccaaactcaatacctttagtctccatatcggcattgttaccctgcttaacagattgtcctccaacaccggaagtaattacataatcaataagatcaaatgctttacgtctgtaaacatctgtagttacttgtactctgtttctgaacaatccaagatctaaaccaatattggtttcgaattgtttttcccatgtcaaatctgcattctgtaaatccgcaatgtttatagcattttctctgtctccggtattaaaacggtttgtgataaaacttttgtaaatagccaatgaatttgtagcaggacctgctgttgctgttaaaccgtatgatgctctaagcgctaaagtgttaacagattcaacattcttcatgaaattttcttctttaatattccatttaccacttaaggtgtaggtaggaagccatcttgatgatcctgtatctccttgtctgttagacccgtcataacgacccgtaatagatcctgtataacgacgatcgtaagtatatcctacttttccaaagaaaccaactgttctctctctttcagctccaaaatcgtagtaagagtttccttcgtttactaacttttcaattaatttagggtcaataaaagcactaagtcctttttcgtattgaattcctgcagcagtaaaattgtcattatttctgtctactgatctaaactctgtaccaaagaaaccttctaattcatgtttgtcattcaaggtgtttctgtaggtaatactatttctaacattataagaagtcatatcgttggtgtattttcttaaaaatccaccatttggcaatacagatatttttggtgctgttaaatcatttggattttggtacaagaacacattatccttttggatttgagtatttagagtcgcaccaacacctgcattatatgcccctactacattcgaatcttcgtaaattttatgctctcttgatgtattggcataacgcgcagaccccgtaaagttataggtcaaatttttatttattttataatctatgtcagcttgaaaacgaatatcgtttacttttatccccatagtattatttttcaactcctttaagatgttcataggagcccagttgttttggtagtattcgtaattaccattttcatcataaggtctaagcgttctgcttgtacttaatacataattaaatgggttaatatcaaaatctctggttattttaccaaacacagcatcatttttactttcatatgtacctggtgcttcctgatcacgtatagaagcaagtgttgataaagtaatatttaatctgtcgttaataaagaatgttccttttaagtttgatgataactgttttacattatcagccaaagtccatcccggatctgtgtagtatcctagagaaccataaaaggtattattttttccaccacctgaaaaacttaaggagtgattctgcgtgatagagggtctaaataaaactttaaaccagtctgtatttgctaattcatatttttgcaaaaactcattgatgtatggctgctcatttctaacgccatactgaccgttagattcattataacgattaacttctttagccaaaataccataaacaccactaaatcttgcagtaatagacgaactttgattaaggtaaccttttgttctcatctcttgaaaaatactcattgattcctgagaatttaaaatatcatactgagtataacttggtacagttctcactgtattttcaacagaataagttacttttagaggagagtctctacgtccttgtttagtagttacaactactaccccatttaaagatcttgaaccatagattgaagtagccgaagcatctttaagaatttcaatactttgaatgtcattagcattcaaacccgctacagcagagcttaataatgttgctgaatttccggaagctaaatcagcaaatgatacgttgataatatcttcctgaacaaccccgtcaataacccataaaggttttgtatctccgaaaatagaagaagatccacgaacagtaatttttggtgtcgaaccaaaagatcctgtaacgttttgtacagtaacaccggcagctttaccttcaatcattctgcttacatctacaacaccatcgacttttaattcactgccggaaattttactgattgctcctgtaaaagttcttttcgaagttttttcgtaacctgtagtaactacaacttcttttagattttgccctgcttcatttaaaaccacaaccggatttgtattggttatcccgatttctttagtctccattccaacgtaagagatcacaagcctgtcgctgtttgttggcatttcgatagaaaatttaccatcaaagtctgttaatactgcgattttagttcctttagccaatacagtagctccaggtagcggactaccactaacatctgtaactgtacccttaataattggccccgcggctgttaagctctcaaacaaagaattatttgattcaacacctgtaaaaggatctgacaaagcacttttttgcaaaataatctgattgcttacttcggtataagtgatattaaatggcaataaaattcgattcaaaatactcgacaatgtttcatcgttagcatctatgctaactttctgattcagttgtggcaatcttgaattgtaagaaaattttacgtttgcagacttttgtaatttagacaatgtattgtctaaagttaaatttgtaatattaattgtaactttagtatctaactttttttgtccatttacatcatttgccatggcaacacttgaaaacacaagtgccagaacaaactgaaatagtgttattttcatgattcgatggagtaatcgttgtttaacaactggttttttcataattttggtttgttttgattaatactgattcgagtgtattttaagaaacatcctcaattactctttacagagagtaatttgattcatttaagtgtcgataatgttacagcatttcggcactttttttatgcattttcttttacataggcgctttaattttcttgttttggttatttttcgattctttaaattttaaaactcaactttacaattacagttgtaaaatgtgattagttacatccatcagatattataacaatctgatttccattcatttcaaatgtggtcttattgccaatgctgttacagacaatttttaatttttccatcaaaggctgatcactaagtgaagtggtaagatgacagtctttgagtttatttttggggtaatcaatgtctacaaggtaggcctgctctatcgtttcaaaaatttgtgataccggaatatcggtaaattcaaagctgagctgctcaatatttccgacactacgggtaaggactatatcctgagtgatatttgtaattttattaaaacttaaatctttacgttgaaaacgtaacgcctgatttggtaacaaaacaacttcatgatcatctgactttgcaaccaggtcgtttgattttacccttactttaccggtgcgaaccaaaacttcaacatcaggttgatcagaataggccttgactctaaaactagttccgactacctttgtaacaatttcatttgcgtaaacaaagaaaggcttcttaggatttttactaatttcaaagaaaccttcgccagataaatacacctttctttcatttccggtaaagatcttagggtaactaagtttactattaggctgtaataaaaccgaactaccatcagataaagtaataatttgagctttgtctgaattattagtttgttctaccaatccttcgttgttttcactaatcaactcattgtaggttacttctctgccaacggttactatttgattgttatataaccaaattgatcctaaaccaagaattaaagcagcggcaataccactaagaaaatatttcttaagaaattttatcttggaacttggggttgaattgttctgattctctttctcttcgattttaatccaggtggcctgcaaagcatgatgcagatctacaggagatataggctgatccggtactttcatggccaacaacaataatctcgcgtcttctaccagcttagcacgctgacgactctctaaagtccattcttcccaaccatcattgtctattttggataaaatccaggactggaatgattcatcagataagaaatcttcaatttcggtatatttattacgtttttgcatctagaaatagggttacaaaaacatagaggacggctttcttattatatactcaccaaattatgatttttttttagttctgtataaataaaattaaaaagtagctgaagaaagaagaagaattaacgaaacactacccttccattctttgcgaagagtaagtaaaccgcggtgtagtaagttacttgctgattgataatttacctctagcatatcggcaatctgatcaactgttaagccttgatggtatcttaaatacagggcctctttttgtcttgccggtaaattgtttaataatttgttcaaatgaactactttttcttttgtagcataatcgtcatccatcagatcgtgttctaccgagaattctaaaagaaaagcaatggaatctgtgcttgctgacttgcggaaaatatgatcgcgttcgtacaaacgtgcaatacgcttgcgcacactcgacaataaataggcttttactacaactgaactttgaagcccgtttttgtaaacccaaatatccgtaaaaacatcctgaacacaatcttgtaccttttcagcatttgaagaaagcgaatttccgtagtttaccaaatcaccatagtatttttcaaacaacagagagaatgatttttcatctccatttttcaagttagtccaaagcgtaagatcgtcagaagttttgaattgtagagttttggtattcatataaaattgcaatagaattcttgaaaataagcacttgtttttaacacaaagaataagatttgttaacaatattctttatatctgacatagatattattaatactattggattctttgtcgttatctataaaaatggagttaccatctttatcgaaccattcgaaattgtaatttggagtacctccaacaacagtaactttaatacttgcatcatcttgtcctaaagcagatgggggtgtttttaacacttgtattcccattgcctgaggttctgtaattgttatttcctgataatctgtacataaattagcatctgtaacggtaacattgtaggttgatgcgaaaagatccttaattgtattttggtctgcatttttccctgtactccatacgatcttatatggaccgacacctccggtaatatttattgtaatctgagcatcattaccgccattacaagaaacatttttttgattataattaatttttaaaagttttggctcagttacagttacaggatttgaggtgtagctgttaccaaatccgtctgaaacttctaaaatataatctcctgcgcgtaatgtctcggaaggatttgttgtagaagcgactacatttggagttaatttattgtaccacttataaagatatcttttatctgcgtcaggaaccccaataggagcccctcccgagatggtagcttttagtatggcttgtttattagcaaaacatttgatagactgggtttctataatggaagtgattaaaagttcatccggttgattaatgatgtaagatgcctctgttgtacacttatttttatctgtaactataacgctatacgtacctaaaccaatgccatctaatagacggtttgttttacctgtcattattattttggtacttccggttccttgataccactgataggtatagggaaatgtcccgtctgctgctgaaacatcgatatggccattttttaacagatagccgcttgcatcaactttttcaaaagaagctatggttaatggttttagcggctcagtgattttaacaattacaggtgctgttgaataagaacaaccattatcgtctataattgtgaaagaatagtctccggcaggaattcctgcacggtcttttgtagtaacaccatcattccataaaatatgataatctccggttcctccctgaatatttaaggtaatggttgcatcgctgccactaaaacaatttacgtttgtttgagtaaaaatacaggtgatagcaggtctttccgttaattccgcaataacaagttctctcgaaatatttacattgtcagttactattactttgtaaaaaccagcatataagttctcaattttgtttgttgttgtttcaactaacaaagtatattgatccgtcgctttttgtttgtaataccatttgtaattgtattgatttaagttatttggagttccaccacttgcaatgacttgtatactaccggtgtttgctccattacaggttacgtcaattttatttacgaaggctacagccaatgctttaaggataacagtttcaggggcagaagtacagttattactgtcttttgcaattatttcatatacgccatctcctaagcctgtgattgtatttgtagtatatatggtaccggtactaataccatttttctttaaggtgtaagtgtacgtttttgttcctccatctgcattcacaattatttcaccatcatttgccgtatttatggtaggttgtgttttagtagtacttgcaatagtaacagctgcattttgggtgatttcgatgttgacaggactaccataagtacagttattatggtccgtaacgatataagagtaggttcctgctgttaattttacaggatctattattttggcggaatcattaacgtctttaaaaatagttgtgtaaggagctgttcctccttttatatctaacgtaattgtaccgtcattgcggccattgcaaattacattggtagaagtatgggttgctgtaagcacattttgtggctcagaaagataaaaatccttataaatttccattttactgtccttaactccaactctataggtacctgtaacaagatttgctatagtagcagtagtttgtccggaaatttgtgtttcaatgccattttctattttaaaccaacgataaaaataagatcctgtgcctccgcttgcctctatagttatactaccggttggttcatttttacatttaatgtctatttgagtaagtggggttatagtcagagcttttagttcgattgtattggtagtggcaccacaaccatttttatctactactttaatctggtagctgccattccctaaatcggcacgggcattggtattggcagcaaaaggctgaccatttttagtccacgaatatgtatagttaccagctccaccaattacagagactgctattgttccgtcattgacagagggagaggagggttgtatttttgtatcaagtttgacttgtaataaaggaggtgatggtttaatctctgttattacattattattaaatttgcaagagttggcatctgttacagtataccaatagctacctgcttttaaaccggttctgtttgcactagtgctgccgtcattccatagcacggatagtggagcaattccaccttttaagcttatttgaatttcaccatcatttattccgaaacaactaacatcttttgtagatagtactgttgattctatttgaggattggcttctagttgtactacaaatccatccgaagtggctcctttactatcagtagcaaaaactttataatagcctgcattttgccccgtaattgagggactactattgggtcccgaaattggatttgaaccaataatagttccagagttgtcgcagctgtaccaggtataagtgtaagttcgggttatcggcgttgggctgtaaggaaatcctccttcggctatagctgttatactgccccttcctccgggacatgttatattagttggttttggggcagtgacttttactttttcaggcgcatatattgtaaaagaaaaatcagcacttctacaggatttgccaatgtcttttgcatacatgatgtagtttccggctggcatagaaaacaaggaaaccggggtataaggctgcccgtctttggcatatatatattcgtagttgcctgtacctccctcaaatccaatagagaatgagccatcggctttgccattttcagttgcatttgtataactgggagtacctaaaattgtaattggtttaggtgttgtaatagtaactgttttggttgattgtgcatttatctgcgaatatcccaataaagttataagtagtaatgtgtagatttttttcataattataggcttgttcgggaatttattgttctgcgcaattgaatttgtcaacgatttttacggtatgagctccgtctgttgtgatgggaatctgataagaaccggaaaacggtattcttttaggaactgtctccccgtttataacttcagtttgattgtctaaaatatagtagtatggagttgttccgccggtagcccgtatttctatggcaccttggttcgcactgcatgcgggttgtattgccgttgcccaaaaagttaaaggtgttttctcttctattgtaaaagcatctgtaacaatagcactggaccccactttgttcccggtatcagaaatactctgcgcctggtattttattttatatgtacccgccgctatgttattccaggtataggttttattaataacttcattttctaatgcggatatactcatgataaaacctgtatccggagcctccggattggcacgaaatagattaagaagaagtttgttacctgtttttaactccgatttaaattttaaagtggcacttcctgttgctgtattgctgcatttaacgggggttgcttctggttttttttcgtctagttcgggtgaacagccaataatagtgtaaacaactgtatttgtaaattgtttatcatagcctgcctgaaagaaaatttgagatttaccatcatgattaccaatatctttaaggttaaaagtaatggatctttttccttgaaattgagcgggcattggtttccatcccgttgcatcgtattgatattgccaattccacccattggttaagttaatgacatcgtcactgcaaacattatttgcggcaggttgtgtaagatgtattggccatacattggatctgccaacacatccgcctaaaacctcgtccttaaatgtgtttttgttataaggaatggcatattcttttgcacatattgattggccacggctgtttagttcaagatctaaaataaatagaccatcaatatccctgacataaaaaaaattgtattgaatcttttcggctccactcgaattaatgatattatcagtgcaaaatcgtttagtgtacagatctatagatcctgtagggcctgttaaggaataatctgtaactccacaaatggtatatcttgtgcttgatgcgtttgaatttttgggtttcatggttgattttatcaatattccatactcggtctgcccatgaacaagcaggcttcctaaaaagaatataaacaagagtaattttttcttcatattattagttttctatacaaccatgactatccagaacggttacggtatgagcgccatccgttacaccgttaattgtatccggatttttggtaagcggagttttaatcccattgtcaagaatataaaagtaaggtgaggtacctccagttactgaaatttcaatactaccaggatctccactgcattttggttgaattgctgtcgttctaaaagttaattggtctttattttctatcgtaaaagaatcggtaacgatagcactagatcctacaatttggccattatcaaatttgctttgtgcctgatattttatggtgtatgttcctgctgctattccttcccatgtataggttttattttcagtttccttttctgatgctttaatactttttataaaaccggtatctggtgccaccggattgacacggtatagattaaaaagaaattgatcatctttttttaggggggattcaaactttagggtaacactgccagtggctgtattattgcatttaaccgaatttgcagttggttttttttcggccagttcgggtgaacagccgataatagtataagtgactgtattcgtatattgtccatacttttcataacccgcaataaaatgaacgtttgcctgactgttgtatccaggtaagtcctttattttaaaggtaattgatggttgttcctggaattgtacaggaagattcttccaaccttcgctatcaaattgatactgccagttccacccattatttaaagttataggatcctccttgcattttggattggagtctggtcgagtgatatgcaatggcattatctcagcgtttgctaaacacccgctaaaaaaccagcccttaaaggtatccttattgtatggaatagttcgtgttatttgtccacatgttggcgacccacccaaaacttccataaaatctattttcgtaggattgcctgtcacataaaaaaaacaatacaaatcattcttgtaattgtcttctaaaaaatcaattgaacacgagttcattcctgccgtaatttgatggagtccgctataatcattcgaaggccagacagaaggtgaagtgattttagattttattaatattccataatcggtctgtccataagcaaacagacttcctaaaaagaataagattaagggtaattttttggtcattattttagttttcaatgcaattagaattgtctactaccattactttgtgttcaccatctgttgttatagggatgatgtagccatttgaaaatagatgtttttgcgacagaggctcgtcatctaaaagataatagtagggaggggttccgcctgtagcagttatcaatattccttttgggtcagtactgcagtatggctgtactgctgtcgatgtaaaggttaatggtgttcttggactgatggtaaagttggtgacagtggacatacttgaaggggacccgctttcaaattgtgtctgatatttaaaattgtaatttccggcaggtatatttttccatttataactaagcgtatttactttttctatatcaggatcatttgagtttgcagaagttactgcaccaccgcctacaggattgcgattgaaaaggtatttttcatctttttctaatggtctgctaaaagtaaataccacactaccattactataactacaggtggtatagtttgaagttgaagtattatctagttttggggaacatggtataagggtataattaacgacgttagaataaacattttcttctgtaatatcaggattggaatctattaaaactctaaagagaatagtaccatagtagttatttaatgccggaaaattggatttaacgaagtcataattttgattgaaattagtactgatatctgttttaataaaatcctttccgtttgtactatattcccaataaaatttttgagttccggtacaacccactgccgccagtaagactctgtcacaaaaagaattagttaaattgtttggtttagttaatacctgattacctataaaataaggaggatagcagtctgcatttaaattatgatcagcgtaagcttcataataatcatcacgacaagggccactgcaggcataagagtcaggacgatatgccatatattcaaaagaggttggctttatatcataaattaggtattcatttttacttataattgctcctatatgagtaccatttgattttacttcccaattatagctgagacaactacattcttcaattgatcggactccattgaattccattatatataattgagaatgaaccatatttggagttaggaaatacaatacgataaatatattgtatctctctcttgttattaattttaaaagacctaagaaacacttcatatgtttagaactttacagtgaaaaaatccattttagaggttcttccgtctttaaagatcgctctgatgccgtattggtacgtcgtattaatggtaatagtcgggtcaggtaaaaagcgtgtttttccggtcacaatctggatcagttgcaatggatctttatctgaagctttgtaaatttcaaaaccatctacttcactgttcgcgtaatcccatgacaaatcgatggtattggttgttttatttggctgagcgaaaaaacctttcacagctggcataacagaatatttaggtacaaataaggttaattccggtgaaggattagaaactaaattgctctcatctttcgcaaaaacagcatatcggtaagtacttccttcaacggcagttttatcctgaaatttctcttccttatttttggtttccaaaatcagtgtccagtccttttgatcattttcttttctgtacaattggtgtacagccacatcttcactctgactgtttgcccattcgagaaaaatcgatccttctttaattttaaaactggtgaaaacaggtgaagtagggggaattacatccggttttttaataattaaaacatctgagaaatcagacatattgtagtgataatctaccgcaataactttatagtataccttaggattcaaatttttaataagtactttgtcctggtaagagttaggttcacttgggcttacagtcaactgtgtaagttcttcttcggcggtgtttcctctatagatacgatatcctaataaatctttttctttattagggtcccaggttagttttacaacacctaagctgtctataactccttttaaaccaataggcttagaaggtggtatagagtctacgggctgtaccaacataggaaatgaagttctgttgctaccttgttttccaagggctgtaatggtaaaatagtttgtagataagagtttgttgtacgtcactgtacggctcttggcagggatgttctttactacttttgtatagccatcatcatccgtatcagaacggtttaattcaaatcctgtgatttcattatccccttctgttggaaattcccaggttaaagtaacagtattttcatccttaaactccttcacagtcagatggggaacatattttaatatttcagcaccttttccggtaacaacctttgaatagggacctaattcaccaaaaggcgaaatcccctgaattctgtagctgtatggtttattgttcgcgatagaatcaacatagaaaatttgactgttattcgtgttttgctgatttaaactggtgtaaggtttatcagtaattctttcgaaagtctttttatcggtcgaacgttctacaaaataattggcgtaagtatgcgaaagtattttaaaattccagcttaacatggcactgctgtttgtaaaatgagccgtgaaatccattggttttgggagtggctgataatcgcttaatcccacgaaaattccaccataagatattgtagcctctttttcaggtacatttgaaattacgcgataggcatatttttcgttaggcttaactgttttatcttccaatcccagacccgcttttttggcaatttcataatctttgtccgcagttaggagagcgaatgtaaatctttgctcattctcttctgaaaggtttacgatattttctaatttatctgttccggtaaccgaaaaattttctccataaatggcttgcgctacaatagcggcattgtcattcttttcaattagtttttcccatgtttccagtgcctcaggtttcaatgtgccagccaggaccactttttcgggagctggcaaagtcttgttgttacgggtaacggtataacgttctacagtatacccataagtatttagttttttccaggccatagcattggtgacagcccagcgtaacaaaattcgatctttttgtactctggctataacttgtatctccgattttatttcggttggatttgcttctcctgtgctatttttttcttgtgaataggtagtaccaattgtaataagagtaaggagaattaaaaatttaagcttcatgctaatctgttttattaaatgtaaaaattgaactggtacctgcttgtccgcctggtagcgtatagtttagtctaacattgtaaggcccatcttttatcatagggaatgttccgttcataatgtaatggtacttactgatcatagcctgattcagactgtttatatacttattgattattttatactgaatttttataaaatcgtccttatagtaaaaagggagattataacgataaggcaatctctcccttaaatcagagcttttcgggttattagttaaatcagccaaataccaggtcaagatttcaactcctctaattggtgggtttcctaatatgtttgtatttctgtttaatgtaaaatcagcttccaatggatagcctttgtatatcaagggataaatatcatttttaaaataactgtcatccaatatagcctcgacattcaccaatggaatatttaacgtttttggactaccggcgatctcaatttcatcaaaaggttcagttgaggaattttcggcatttaaggcatgctgatcagcttcaattatttctgtatgagtttttcgcggtttttttgccgctattttttcctgaaaagtattgtactgactggtattgaaattatattgtaacagttcaacaccctgaccacccgtaagagtttcacccagtttattactttttacctcaacattagcatttgaaccaagatcctgtttctcaaaactttcatttagattggtattggcatcttttagagtttctaatgtcattaaagataaattatacaattttactcgctctaaaaccggcagactaacaatgaccttttttaaagctgtgttataggatatagtgccatttacggttttatttccggttttataaaaagctttttgtgattgccccggtttgagattaaacaaataagcctgtccggtttttagaaccatataagcttctttactctcgttttgataaacatatttttgatcaaaaacagggtagcagtaagcaatattgttcaccggaatattgttaggtgctacacccgtagtaaaagttctggtttcagtttccatagcaacctgaccctgatcgagaattgtttgccatgaaccgtttttatattcctggaaacttacttttaccgttaaggttagttctgatttttcaggtaatatttcagatgaattgaaacttaccaaatcattcgttttattccagcttaaagtaccaattacaggaactccgccattcttgatggtatattcttctagtttgagtcggtaggttttaatcccgtcatctccttcaatgttgaagtttttatctacaggcatattaaatccaacctgaggaatggtaaagacatctacctcttttgttccctgagcaggagtaatatctgcgatagattttaaaccttctaaagggttcgcggatatgaattcgcactgttccccaaattcaagtttaaagcggaaactacccttcacggcaccaccaagcagactgaattcacccgccatatatcctcgaatccataccggattaggtaatttggcttgtaatagaacggctcctccaccttttataatagatattttctttcgtataaaaaacaatttgatattaattccgagttctccttgtagataagcatacgactggccgttagcataccaaccgtttataccaatttgtccggaacctttacattgtgcttctccataatctttaaccataatgtcgaatccaaatccggcctgaaaattggcataaaacattaagaaacttaaatttccagttttgatgctaaaatcagaaccaaaggcaaatccttttcctgaagcaatgctgttttcgtcacgcatataattcagtttagcgacatcaacttttaaaagctgtgcaacaatatccggtggtggaggactgcctgggatatcatctccaagcataaagtaaccgccggcttctacttcgatagatccaatagccagctttatacccaatcgatcagtaggagtacctgctctgatgtaccatttgtccggtccaaaatgtagcactgcccaacctgctctgttaccagaagcacggccttttatgaagcctcctggagtatcaatgtataaatcgaatgtaccgtgtaatgtttttgccctaaaatcgtattctattgctgcaaatgcattgatacccatcgagttttttacatcgtttgggtaaagctgttccgcagcagccgataaattgtttgttttaagtacttctgaagcgactgcccccattagagattcattttcagtaacagtttgtaatgcctttgttatttcgtctgctcccggaatttcaaagggctgcatcacgtgaccttcaccataaatactaattctattaagaccgccatgtttattaaaagcaatttcaaagccggcacctccccaaaaagcatttgccgtagctgtgcccgcaaacttaatcatagctttaacgcctaatcctgaatctgcatcaggtacgtaattcgacttagaggccacaaaagaagaactaaagccgtctttcttcatttgataataggctcctccaccaaaacctttaaaagtaatggccccggcaggaatatttaaattgtctaccatggcatccacataccaatatctaaaagtagtagatccaaaaatagcattagcttcaaccttgatacctcctgtaaaatcagccgatacacttcctttgaaaccgtttccgtacaccggatcattgtccattatggtgatacttcctttaaattttacacctcctaagtctgcagcaacttttatttcttcgaacttaagatgatcgtatttccatttttggattcctttctctctgtcgaattttccaaccacataaaatttggtttgaccgttaaattgattttgcataatgttaatggcaacatcaactttcagacttgctgatacatctgtagcgaccaaagcaatttcgttaatggtaaccggaaaattacttactgcagcatctttttcctgaatgtgtttgtaaccgaaatagtctgccgtcagatagggaacaacagtttgcagggttaaattctggaaaataattcctttaaaatttatggcttcttttttctcgccttctgcatcagttgatccggatgatttagttggtgatgcaacaagttcggctgcggtggtatttttattacttccttttaaagctaaacttccgtaaagaaccgcttttggtaaaaactttccatcctttacctttagttccagataggagtttttttctaaagaggcggttgccttaaaagcctgaaaacaaatgttgtttgttacatcagccttaaggatatattcgttgtctacaggatttatgatggcattgtaagccaatcttcctctcgattttggatcacattgcgtattttcttccgaagaaaccggcagaacaatttcaccattaaaggcggccgctgttaatgagttggctctaaattccatctcaatatggtccaatgaaaattgccagcccgaagcacttccttctttaagactaaaaacattatcaccagaaaatttaccagaaacccccattctgtcaattaagagattggcggcttcaaatttaactctcttgttctcgtctctcttattaaactgttccggtaatacgactttcagggatttgacataaaaacctctccataatttttcgttaccgggcaccagataatctttgacataatccgcatccggccattcaattttattcgagttcctgatgtcgcttaaatcgattacagcattgtttagctcaaaagcagggcctttgcccttatatgatgtcaattgaaatttaggtaatgatatttcaatcaaaatatcattccaattggaaactatggtttgaaatgaacctcgtacgcgggtcggagcgggaataagcctgtaatcattatcaaccggttcaagataggctcttgaaaattcaacatccgccgcaattcccagttccttaaaaccattacagtcaatcgttacataagtctttttttctacaagtcctgtagacatctccatgcctccttttaaaataagtaaggagttttgaccatttatattaatgggaacgtcacccagtaaaaccaagttcgtagccccaaccaatccgcctttgtgagaaagtttaataccattagccccaaaaaacaactcttttggtcttccaagtgagtcatgctgtggaattacaattttcacaaaagcagtcagctctgtatattccggagtaaatttggcgctgctaatgccaagcatatattggattcctcctatggtcttttttataccaagaggaagcatcgataattttttaggctctaaaaaatctgtaaggttatcgtttttggcaatctccttaaagacagacatggccagatcacgatctttattgatctcctgtgaaactgggaagttcttttttagaaactcattggtgaattcgctttttggagtttggtaataactaagcgaattgttgagaagaccaatttcgtctttgggaagatttttagaaataaaaactttctttgaattggtgatggtatcggtgtaagtattagaaaagcaattgatgctgactaaaaataaaataatacatacgataaaaggaaataacttaagagtagtttttttcaagtcttagtaggtttggttggtattaggcaatatagtagcgcgttaacggatctaaagcaacttctttagggggaccaaatagttgttgttgtttttaatagaaagaaaatggtttattgaggctataacttcttttcaaaacattcgatttcaggtacagagccacaggaaaaagactctttttatttgcattcatgtaagtatcaaatgttggttttgttaaatttttgccaaacataaacaatctctgaatttattctttacggctttccacattatggcaaaaaaaaaccccagattgctcaggagtttgatttgtaaaataaaaaatgtaagtttttactcttctttcattgtgtgataaacgttcatcacgtcatcatcttcttcgattttttcgattagtttttcaacgtctgcaatttgagcttccgtaagttcttttgtaatttgaggaatacgctcaaatcctgaagataagatttccagacctctgttttccagttctttttgtaaagctccgaagcttccaaaaggggcgtagattaaaattccgtcttcgtcttcaaaaacttcctcagcaccaaaatcaattagttctaactctaattcttcggcatcaatttcaccttttgcaattctgaaattacaggtatgatcaaacataaactcaacagaaccctgtgttcccattgttccgttgcacttattaaaatagcttctgatatttgctaccgttctgttattgttgtcagatgctgtttcaattaaaatcgcaattccgtgcggagcatatccttcaaacaaaatttctttatagttggcagtatctttattacttgcattttttatggcacgctccacattgtccttaggcatgttggcggcttttgcattttgtattacagctcttaatctagaattggcctccgggttgggaccaccttctttaacggccataacgatatctttaccaattcgggtaaatgttttagccattgctgaccaacgtttcatttttcttccttttctaaattcgaacgctcttcccatttctaatttttagttttgtgtggcaaaaatacggttattccttatttttccaaaatcaattgaattcttttttagtgatagttagggcttagaggttaaaaagtttaaagtttacggtttaaaattatccgaattcccttttgtaaagtagaaagtctaacgtccaatgcctacagcctacagcttacagcttatagcttaaagcctagaactatttccaagcattaaactcattaataacatttacagcttcatttagatagggattcgtttttagattgtcgatctggtattggttgattgttttgtcattagggtatacccccagtagaaactgatttaccgtagagttatacacatccagaggattgttttcatcgttaaaagttgtgatttcggtccaaagtgagttcactacttttttctgtttgaagaccgcatctaaagtcatcggaatttccgcttttggagtattgataagtttgtcaattttttgattgatttcttttatgttattgaaaaaataattgtctgccaatcttgttgtactagtttgggccagtttgtcgattagggctctttttacgtaaggcttgaattttaaagacggtgtaatactatcatttttaatggcggtagggaaattgctttctcgttgataaacattttcatagaattcaggaagaattacatccggttttactccaatatattgatgacttttacctgtaactctgtaaaatttgttgattgtaatttttaaaaaatcagtgtttttagtttcgtcaagcgaaagaatcgtttgcatggtcgctttcccaagggtagtacttcctaataataaagcacggttataatcctgcaatatagaggaaaagaattcacttgccgaggcagtattgctatttaccagaatgactatcggacctttataaatcaaacctttatagggatcattaataatcgattttccctgattacgatctacaactatagaaagtggtccatagtcaataaacattccggccagttttatcgcttcttccatcgatccgccaccattgtcaattaaatcaattacgagtccctttatattgtctctttccagttttataacttcgcgagccacatcatcagcacagcctttgcgactattgccttctaaatcagcataaaaacttggaattttgatgtatccaattttactttcctttccaataataaagctaaaaacagaattctcttcgtctttcatcacctttttttcgatataaacatcaaagcttttaccggagtttcgttttaaagttagggtgatgcttttgttagattccgataaaatcaaagttgagatggattccagcgaagcacaggaaacctgtaaagtttctttttgattggatattgaaatgatctgatcgccttttttgacctgacctgtttgataagcaggaccattaggatcaacttcggctacaatgatttcattcttttcatttaaattgacagtcattcctaaagataaatgttctttagagagtgaagcaacaaagctcgttttagaatcgtcactaaaataggcagaatgcggatcaaagtagttacaaaagaaattgtagaacttttcttcctgtctaatatttgtctctaaaagcgtattgattcggcatatttcattggataaaattagtttctttgatttgagctctatcgactgaaaattgactttaattgaatctaaattgtcacttagttcggctatctcatccaaaatctggtagcgaatttttttaagccatactttttcaaggttttcttttttaagataaaaaggaaatgattttttataaaatcggatagtatctgttttgctgtaatcaataggttcagtttgaattttttcaagaaccttttttgttctcaaaagactttctttgtatttggaagtaatatcggctaaaaaactgcaatcattactaagaataaaatcgtccaggtttgtgcggtatttctttgccatttcatcatactccgttttaaaaaaaatatttcgggaaggatctaattcgttgatcagattatcaaaaacaaaaatcgacaagctatcatcaacaggttttggtcggatgtgctcttcctgaataacggcatttattttgttgactatttcgcacgtgggatttccactttgactaaatagaatatttgtggttagaatcaacaccagtgctatttttttcataaatgtaaatcttcgttcagactaaaattacgcttatttttttataaaatcttattcttttctaaaaattcttacattcagatgatttttttctgcggagttttcaccacgaattcacgaatttggcgggcttttttatttaaaatcattcgtgaattcgtggcaaaaaaaacagggtataaaaaaaatgcattacttatcaggcaatgcattttctaattttatggagataaaaatctattttttgtaaaaaggaagtttaaccactttagcagctacatcattttttctgattctgataaagatatcgctgtcaacagcactattatttaccgtaacatatcctaatccaatacctttgttcatagaaggtgacatagttcctgatgtaactacaccaatcacagcacctgaagcatctacaatctcgtagtcatgtcttggtaccgcacgctcctgcatttcaaaagcaattagttttcgggtaacaccttcttctttctgttttttcagattttcagaattagtaaaatctttagtaaacttagtaatccagcctaatccggcctctaaaggtgaagtagcatcgttaatatcatttccgtacaaacagaatcccatttcaagacgtaaagtatcacgagcagctaatccgataggtttaattccgaaagcggcacccgcttcgaaaactttattccagatagcttcagcgtcggcatttttacagtaaatttcaaatccaccagaaccggtatagccagttgcagaaatgattacatcgttgaatcctgcaaaatcagctacttcaaaatgataatacgtaatagctcctaagtcgatagaagataaaggctgcatcgcttcaaccgcttttggtccctgaatagccaataaagaataatcatcagaaatgtttttcatttcaacacccaaatcattgtgcgaagaaatccagttccagtctttttcaatatttgaagcatttacaaccagtaaatactcttcttctttcattttatatacaatcaaatcatctacaattccaccttcgttgtttggcagacaagaatattgtgctcttccgatagttaaagtcgaagcatcatttgaagttactttttgaattaaagccaaagcatttggacctgtcaacaaaaattctcccatatgcgaaacgtcaaaaacgcccacactgttgcgaactgtttcgtgttcagcatttacgccttcataggtaataggcatattgtatccggcaaaaggtagcatttttgctcctaaactctcatgtatgtgcgtaagcgcagtatttttcattgtgttgttttataaaattgtgtcgcaaatttatttaaaaaatatcgaagatttatatactaaattaataaaattcgcaatattcttgcccaatttatgcatacgaagcaatatcctgtagtttgaatagtttttgacgttttggttttctaaggaatgaaagaaacctgctagcggcaacagaatctgattttagaatcttacgaagtgtctacatctttattttttatgtaactttaagagtctgtttaaaatttatttttgaggtttattatcaaaggattttcgagtgaaacaaggcaaatttttatagaatagcagcgctattgtatgaaaaattaacgaagttttagctgaaaatcatcataagaaagccaataaataaattttaaacaggctctaaatcattaaatctgtccgatgaaagatccatttctaattacaaaagaagaggttttaaaatttctccaaccggtgaatcctataacgcataagggacttcaggggcatgcagttatcattgcaggaagttatggaaaagtaggagcggcagttttagcctcaaaatcctgtttaaaatcgggttgcggactagtaacggtttttgtacccaaatgcggttatcaaattctgcagatctcgattccggaagtgatggtaataaccgatgaaaacactaatttcctgaccagcattcatcttccgttagtacctcaggccatcggaattggacccggaataggagtggaactgggtactcaaaaagcgctttttgagtttttaagagtgaacaaatctcctttagtactggatgccgatgctctgaatattatggcagaaaatttaacctggctcgaattagttcctgaaaatactattctgacaccacatccgaaagaactcgagcgtttgataggtaagtggaattcggaatcggaaaagtttcaaaaaacgattgctttttcagaaaagtacaaagtaatcatggtcatgaaaggcgcaccaacctacatcatcattaagactgagatttacgaaaacaccaccggtaatgcagctttagccactgccggaagcggagataccctcacaggaatcattacaggcttactggctcagggctacgaacctaaatacgcagcaaaactaggcgtttttctccacggactcactgccgatattgcgttaccaaaaacaggttatgaatcttttacagcttctactattattaagtatttgggaaaagcttttttgagcttggtttaaccgcaaggcacgcaaagttttacgcaaaggttcgcaaggtttttgtagatagctttgtaaacttcctccacagactaacggctggtattattttgtcgacaacaagtaatgaatcttttacgtcttgtgctgttatgaagtattttggaaaagcttttttgagtttgatttaaccgcaaggcacgcgaagttttacgcaaagactcgcaaagattttgcacaatgccttgcgaacctttatgctttataagaatcttaaagacaataccctcgcgaactttgtgaaaaaaaatctaagcagtctaagtaagtctaatattcgaaaaatctaataatccaacaatctaacaatctaaaaatctaagtttgtatctatgaaaaatacttttgatctgagaacagtaaacgtcatgcgttatataacgccattgcgcgagggaggttctttacctgctttggcagaagccgatgacgattttaaatacgtcttaaaatttagaggagccggtcatggtgtaaaagctttgattgccgaattggtgggtgggcaaatcgcaaaagctttaaaattgcagcttccggaattagttttcgccaatcttgacgaagcgtttggaagaacggaagctgatgaagaaattcaggatttactgcagggaagccagggattaaatctggcactccattttttatcaggagccatcacattcgatcctgtggtgactactgttgatgctaagctggcttcgcaaattgtttggctggatgcttatattaccaatgtagaccgtactttcaaaaatacaaatatgttaatttggcataaagaattatggctgatcgatcacggagcgtgtttgtattttcatcattcctggaacaattgggaacagcatgccaaaagtccgtttgcattaattaaagaccatgttttattgccgcaagcttcgcttttaaaggaagtagatgctgaatttaaagcgcttttatcgcacgaaatattagaagaaattgtaaatacaattccactggaatggctgcaatgggaagataccgacgaagagccggaaaccttgcgaaaggtgtatttacagttcttgcagacccgattaaatcattcagaaatctttgtaaaccaggcgcaaaatgcaagataatcacttatatgagtatgccgtaatccgcgtggtgccaagagtagagcgcgaagagtttctgaatatcggaatcattttgttttgcaaaaaaaagaaattcataaaagttctttttcatctgaataaagaaagaatacaagccctttctgccgactttgacatcgagcaattagaatgtaatttaacgtcattagaaaaaattgttaatggggctaaagacggcggtccgatcgctgaatttgagattccggaacgttttagatggctcacggccattagaagttcggcaatacaaacatcaagacctcatccgggcttatgtcaggacttaggaaaaacgattcagagattatttgaagaattggttctttagaggaggtttacagttgtagagatacaaaggttcagaggtttttagtagaaaagggtatcactgtctgatatgtttaagaaaaatgcaaagacgctaagacgtaaataatataaaactttgtgaattagcgtctttgcgagactaaaaaatgttgaattcttttgattttgtgtaaaaccttcttttgcaaatttctataattccgatgcttatcattagacagttttttgccgggaattgttagaaagaaaatacctgttattgtttttaatttttttaagtttgcttcataaaaaacagtccaaattaaatttaaatcccctttgtaaacctacaaaaagtatgaagtttcaaaaattacctttgttaccattggccttaatggtactttctctttattcctgtacgtcagaagattctccaacatcaggtgaaataacagatcccgccgtaattaatccggcagaacaaaaattagtttcaattgcttatccctcaagtaataatctggcttatatgatggataaacaggagtttaaatatgataattctaaacgtattaatgtgattgggagctatttatctgtttcttatgttggagacgatttgattgaaaccaaaacattaggagataatgtatctaatgctgacattgaaaacaaaacatcgatagtgttaaagaataaaaatgttaccagtatcatttctaacacagtttttaaaagaactacgggagaaacttacagtatcgaaagagattcaactgtttatagctatgcgaatgaatacatctctaagattttaagctatcataagaaatctgttgacggggatggaaagtatcgtttacaaagacaattggatttccaggttacagcaggaaatattacacaagttaaaactgctgaatatggtgaagtagtcgttagtaattatacttatgatagtacaccaaatattttaatgggagatattgcatatgaaacaccactatctttaattagagggtataacattttattacatgataaattaggaaaaagaaacgtaaataatgttgtttcaatggaaaatgtatttaaagaaacaccttttcaaaaatcttacaaaactgtaaattacagaagaaacgtagataaatacggaagaattagcgaaattgtaatatccggaagttgtgtaaccagcaatccattcaatacggctaccaattttacagatgaaaaagtaatcttcgaatacaaataaaaaatctcgcaaagttggagagacataaagattcagaggtttgaagcgacgaaagttaatttaaccgcaaagtgcgcaaagatttaatgtaaagctttgcgaacttttatatttcatgaaattttcaacagattaaaagcattgtagtttttgcatcaaacctaaaacttgaaacctaaaacttgaaacctaaaacttgaaacctgaaacaaaaaaaacctgaaacaaaaaaaccacgaactacaaaactgtaatccgtggtttcaaaataaaactaacttgtatttattaattgtaatggattaaaacgatccgcagatattgcctcctaaagttgctcctgcattggcagagatatcagctttaacagcagttttgttcagttttacgatcgaatagggtggagtaaaagcagtaccgcttcccgcttgatttccggttgtattggtgaaaacattgtctgttgctgtaacagcagtaaaaccgctcattagatcgataggcgtttttacaccttcaaaaacgttgctttctacatttagattcgcttcaaaacctgccgcaatacatttattacttactgtgctgttaaagaagttgtttaccagatgtatccttccaaaacgtactcttggcattctttctttgcatcccggagcccaccagcagcgagcgaaagtgattcttaattttccacggtcggcagttgcaccatcactggaaccaattaaattagaatacctgtgatcgtcagaacctcctggacctccggctttaggagcttttaaataaccgaattttgtatacgaaaccgtaataaaatctgatttgtttttgatatcgaagttcccgtcaacgccatctctgaattcgcaatggtctacccatacattttggcaatcatctaaaatagcattgtcccaaccatctgtgtcataagcacccggaccttcaaaaataagatttctgataataagattggtgcatcttttaatgttgatgatacccgaaccgtctttcgtttggttagtcgaaaccagttttgcaccgcttgcaccgtaaatggttttgccactttgatcctgtagtgataatcttgtagtaaccgtaatggtaccggtaactttaatcacttttacagcactgttttcaatagccgatttcagctgtgtataattcgaaactacttcttctggagaggaacctccaccagttgtccctccattttgagaagcccatcccggaacctgggcgcagtttccaatttttgccgtcaaattaccggaagttgttggagaggtttcgatagtagcattttcactactttgcggggtagcaatttcttcggtattacaggctgcaaaaccgaaaatcaatgtcaatagaaacactgagattgttgatttaaatttcataataattaagtttggttaaatagttaatagtgcaaatctgcttataattaggatgaaaaaagttgaacaagttcaatgttttgaaaataatttactgttaaatgtgttttcggtagccgttacattacaaaaaagtatatttttgtgtaatcgattgcattatttttcattcattcacctacttacgtccctgagtaagaataaaaagtaaataccatatgtacaaagacctacgattaagtatcgagcgcaagattccgttaacagatgaggaatggaattttgtagttgaaaaagtaaagtttattaaacttaagaaaaacgaatttctgcagattcaggattcaaagagttcttatgaaggctttattttgaaaggtacttttaaaacctatattttaaatgacaacggaaccgaaagtgtcattttcttctctttcgaaaatgaatggatttgtgaccttgaaagcttctatcatcaaaaacctacgacttataatatcaaagcaatagaagaaagtgaaatcttggtgatcagtaagaaaaacaaagcacttttgttcgaacaagtccccaagttgattcagtttcatattttaatggttgaaagggctaatattgccattcaacaaagacttattgatgtattaaacaaaacttccaagcaaagatatttggagtttatggcacgatattcacacaaggctgataaaatcaataaccggaatttatcctcttatctgggagtttctcacgagtttttgtcaaagattaagagaagctgctaagattctaagaggctaaggggctgagtttttttagtagtatgctttgataaatagaagaaagaagcaagaacaaagaagcataaactttgcgttttcgtgtctttgcgagcacatgtcgtgccagttaaaaaaattttgcgaatccttgcgtaacccttcgcgaacgttgcggttaaattcattccggattttcaatcactaacaaatcataaggttttagatcgtacgtcttctcattaatttgaacaacggctgtatctaaagaaaataaaagtaccatttgagcattacaattttgattagcagctgttattttcattggtaatgggatattaagattctaagaggctaaggggctgagtttttttagtagtatgctttgataaatagaagaaagaggcaagaacaaagaagagcttaaactctgcgactttgtgcctttgcgagcatataccatacctgccaaaaaaactttgcgaatctttgcgtaacccttcgcgaacgttgcggttaaattcattccggaattaaaaatccaatactccaaagaggcatttattagaaaagtgaagtgttatgtttttcttttccggattttcaatgatcagtaaatcatagggttttagatcgtacgtcttctcattaatttgaacaacggttgtatctaaagaaaataaaagtacgatttgagcattacaattttgattaacagctgttattttcagttggtgatgggatattttttcagaaaccatccagttaaaatcaatgccttttgtaaaagaagttacggcatcatttgagttaaattccatgatttcatattgctcatatatcttcttttgtttgtttatctcaatatgcaaatcgttatcaagcataaccagatatcgatgataacctttaaattgagtaaataccgatggttcctgctctatggtagcactgcttattctgaatgcgaaatctctatcagcgtagtttgctgttttgggatagatcatatattcatacgtcaatccaccgctccaaacagcgggtttacaattttctttgggtaaaaggtgtagggtcatttttttattattggaggttcaaaggggcaaaggtttttctgaggtactaaggttctaaggtgctgagttactaagtttttttagtttttactttcaaacctcaaacctcaaacctgaaacttgaaacctgaaacttgaaacttgaaacaaataaaactaaataaccttctctaagtaaataaactccagaggttctttagaaatagtaacatgaatttcacttactggaaaagcttctctctcgcctgtatcaacatagccgtgacgtttgtaccacgcaataagttcatcccgaaccgagatcaccgtcataataatactggataatcccaaagctttcgcatgattttcggcttcagacagcatcttttttccgataccgctgttttgtaattccggtgaaaccgttaacattccgagatacaattgctgtcctttttcgaccagtaaaaccgaaccgataattgtatcattttcggtgtattttagaatggtgtttttaggatccagaaaaatttcggtcatttcctgttcgtcagttctttttccttctaataaattggcttcggttgtccagccttttttggaggtttcccctctgtaggccgaattgattaaaatggttaacgccggaatgtcctgtaaagaagcttttgtaatcatgaattattgtaattgtaatttagtcttaatatgttggttatgattgatttaatacatagagacataggttcagtatttttgaaaaagacgtttcactttattttaattcacatatacttctatgtgaaagaaatttgtttctctttttcgtcctctttgattatgcttaaaaatctatgtttctatgtgttaaatcaatttttgttcattaaacccaagaggttcaatttagtattttgcaggttgtccggctttaggtaaggattgcttaatgaaagttctgatgtcttcgttggcagcttctaaatctgcttttctcaaatacatcatatgaccgcttcggtaacctttccatgacattctatccgttagttttccgcttggatccatttgccataaatcgtattttgaattaaagtaatcgcaggcgccatcgtaatatccggattgtaccatgacatgcaaatatggattttgagccatagcctgtcttaggttttcgcctgttttatcattcgatctgtcccaaggatgtacagagccgaacatattgtatttaaagtctgttttgtagttcaaattgttgcgtaggtacatattgatggcaggcgtaaacgagtgcagccaggaagtaagttcggcattaaaatcagggctttcgcctgagtctttgcggtcaattcctttgtatctcgaatcaagtcttcctaccgtatagcccttatctcttagcagttctttccaaaaataatcataaggaagatctaaattgttttgctggatcactttctccggaataccggaataacgtgctattttaacgccaatttcttttcttttttggtcgttcagagatcctcctttggtcaatgcaggaagaagttcgttgacggtaaaatcttccacttcgggtaacatgtctgttaaatctttgttttgcagatcaggaggaagcattttgtggtaccaggcagtagctgcaaaataaggcaatttaagagcagcatcagaaactacaccacgtgttattcctaattcagttggagaaaccaaaatcactccgttaagatacatccattggctgttttgcaattgaagcgctaatcccgagacacgggttgtgccataactttcgccaattaggtatttaggagaagcccagcgattggtacgggttacaaaaccattgatccagtcggccagatatttaatgtcggcatttacgccaaagaattttgtagtaggaatgtctttgctggtaggtctggaataagccgtattcacagggtttacaaaaacaatatcggcaacatccagaatagaatacggattttcttttattccgtaaggctgtacaggatatccttcatcatcaatgtttaagagactcggtcctgtgtaagcaatctgcatccaaaccgaagcagaacccggaccaccgttaaaggaaataactagcggacgcgaagcctgatcttttacatcagaacgctcataataggtgtagaacaatccggcaattgcttttccgtcttcgtcccaaaccggcatcgtacctgttgtagctttgtaaggaactttttgtccttttatggtaacggagtgattggtgatcacactagcatccggattgaaagtaagattagaaggcgaattttcttcttttgcaggggcttggggagcttttggttttgattcctgagcagatgaaattaaggatccggctaaaaggaatacaagcaatgtttttttcataaaaatagggtgttaatagaaattaatgctctaagcaggtggctgtatttagaatttttaaagatataaaaataatcataagtgaggatttttaatctctaagagaggagaagtaattttaggaaggtctaagtgggatagggatcccccatgttttttgactagcctcctgctttagttggaggttttaggaagttttcattgtggctttagtcaaaaataagtatttggctaaagcccaattcttatttttgaatacaaaacccctagctgaagctgagggctattgaattgatttatattgaagttaattttttagatttttttttgaatagcctccagcttcaactggagaaaataaagaagagaataggaaatggctttagccgaattttttgtgatttaatttgtttgtgttcgggagcaggatgaaatcaacaattttctaacttccccttttaggattattactaaatggaataatggtttttgatttatttttaagaacaaaatacttacttttggcgcctcatttggggaaagccctactaattaatttttacaaactaaatatgaaatttaaaaaattactattactctttttaccgcttattttttttagcattgtttcctgttcttctgattctgaaaatccacaacccactattaaaaatcctgaggttatagatcctgtgactaaaaaaataagcacagctaaatattcctatgatggggggcatcctttaccatacactttgaatgaagtaaaacatgagtttgataatttaaatagaattagcaaaattagcatggatggttggatttatggtgttacttatgtgagttctgatatcataaaaattaatttgatagaagatcctgtcgccggatataaaaactattcagaaaaaacactgaaattaaaaaatggagatattaccactataattgagagaagctcttttttaaacgaaagtacaaatgaagcatttggtgcaaagatagattctgttacttttgcttattcggatcgttatctttctaaaattcaatactattcaagtaaagataatggaaaaagctatactttaggaggtcaatttgactttcaagttacagatggaaatattactcagcttaaaagaactaatatttctatagggaatgttaatattatgaaatataaatacgataacagtgcttatattaattttggagatattaactttgaaactcctattttctgtgttagtggagcatttgcaactttttttgatgacaagttaggtaaaaagagtaaaaataatatcgtagatatagaatttgataacaatgaagatgtcgtttttatggtaggttatacctattttaaaaacattagcataaaaagaaattttgataaatccggagaattaaatgagattttaatgtcaggaactacctataggtattcaaagaacggtcctactactacgactagtactaaaactttttcggatgcaaaagtgaatttgatttataagtaattagaaggaataactgtaaatttaaaaagttcgcaaagtttaaaccaaactttgcgaactttttaaatttttggaaattctaagcggtataaactaagaatctttagtcaaaagcataaacttctaccttaaaagtaagtaatttcaaagtttctttaaaaaaaagatactattaccccagaaaatcctcgctatcgcgagcgtctcgctggtgtccgttccaattgattatcgattttctttgcgttcacgagcgggacgctcgcgctagcgggggattgtttcacataatttttattaaaagggatttagtttattttctgaatctgatttagtatttctcttctctttttcagatgcagttacttcagatataagatttttaagttcgttttggttaaagttttctgcaacttttttaaaacttgctaaagctgtttctaaaccatttacagaattttttgcgcgttcttttatttgttcaatcaaaggttcgtttcccgaaataggctgtgatgaaaactctttatatagaaagtttcgaccattcacgtatttattactaccattgtaaaattgatttccaacaatatttccgaataattctagatttccaatgattggaatttgaaaaattgcataatccatatagcttcccggagaaaatgaaactccagatggagcgttgtgaaatccaattatttctttgtcaatttttacaacggtttgagttttatctaatgatggagtttcaattgcataagtattgtaagtcacattttcaaattgatctgaaaaaagatctctatcagaagatttcaagattttcatttttacattttccaaaattgcttggtaaacatttttcatgatatataatttaaagttcttgtttagtgagatttcgtggtaaaaatggatctaaacttttgtatacaggtaacaaccctctgttgttgtcttaaattagtttgagttatctaaagttaatttcgtttttaaatatccctgtttttttcttaccaattttttaaactttgatgtctaatgataaaaaaaatcccctaaactagtgtgagcatcccgattgttagattctaatttttaatttgaaaatctttgctagcacgagcattaaaaccaaattgttacaaatatcacaaaaacaagtattttagttattttaaatgttaaataaagactacttattaacagaaaattaagatatttgggaaaactaaccaaaaatatttacaaatgaaaatcaactttaagttttttttggggttattgatcgcattatttatgcaaatagccaatgcacaagaaggatcgattacagggaaagttactgactcaaaacgaattcctcttccgggagttaacattcttgtaaaaggaacaaaaatcagtactcaaactgattttgacggaaattttaaaataacagcaaaaaaaggagacattctaaccgtaagttatgtcagctttgcaactgtacatgtccctgcttctaatttaatgaccgttcaactggtcgaaacacaaaatgaactggaagccgttttggttgtaggttacggaacacagaccaaaaagaatttaacggacaatattgcccgcgttacggctaaagatatccagcaaatacctgtttcaaacgttcaaaatgcgctggtgggtaaacttgccggtgtacaaatcactcagaccaacggtaaagttgaaggtggtattaatgttagggttcgtggtgctgccagtattagtgcaggaacacagcctctctacgttttagatggaatccccttgattacagacaacgaatccagcaacggagcgccgacaaatccattactgactttgagcccgaatgaaatcgagtctattgacgtcttaaaagatgcttcttctgcagcaatttatggtgcccgtggagctaatggagtggtaatcatcactaccaaaaaaggaaaagacggaaaaggaactttctctcttaatttctcacaaggtgttagtgaagctacacacaagagaaagtggcttaatgcaaaacaatatgttgaattaatacgtgaggcaggaaaaaatgttgacgatttagcctcggtagaagaagaattagatcgtctggctcagggaactgactggagaaatggagaaattgatacagactggcaggatatcgcctttcaaacgggatataccaccgatgctgatttttcggtttccggcggagacgacaaaaccagatacttcttttcaggagcttacaacaacactaccggaattatcgacagcaatagtctggagagaataaccggaagatctaacttatctcataaagtatcagatcgttttactgtgggaatgaacattggtttttcaagagccatcatcaacagagttcaggacgataactcttttacatcacctctacaatccgtagcgcaggctccaatatcacaagcaagactggcagacggaacagcaaatccgaacacagaatatgctaactatttattagcaaaagacaatactttctggaaaacgaacatgcgcagacttaccggaaaggtttttggcgaacttaaaatagtaaaaggtttaaaattcaattctgatttctcttatgattatctaacacagaccgaagactcctggcaaggaaaaaatgctccgtttatggcgacagacggtgaggtatttgcaacctctgttaatactgaaaattatgtttttagtaactactttacttacgacaaaacgtttgcagaaaaacacgttctaaatgtcgttgcgggtatggaacttaacaaatacaaccgcaggtatcaagatgtaaacagcatctatttccctaatgatggcttccagacaattgacggaggagcagaagttaatgccggggccggaaacgaaactgattatgcctttgtttctcaatttgggagatttaattatgcttttgacggtaaatatctgttcaaagccagtattcgtcgtgacggttcttcccgttttgggaaaaacgaacgctttggtgttttcccggcactttctgccggttgggtaatttctcaggaaaatttcttaaaagaaaatccggttttaacctatttgaaaataaaaggaagctggggtaaattaggaaatgccgaaattggaaactttgcctcccgccaattgtaccgtccgaatccttataatttaaaatccggattaacattctttcaacctggaaataataacttaacctgggaaaaatctactcaaatcgattttggtgccgaactgggctttttagataaaattacttttgaagccgactactatcaaaaagataccgatggactactctttgatgctccacttccaaaaagtgcaggtgccggtcctgatggaactatcagtaaaaatatcggaaaaatcagaagcagtggtttcgaatttacgttaaatactaaaaatatcaccaccgaaaattttacctggactacaagtttcaacttaaccacaaatcaatcaaaagtaaaaacgcttcctaacaacaatgcagatgtaattagcagttatactattaatagagttggcgaaaacatttcatccttctatttggtagaatacgcaggagttgacccggcaaacggagatgcactttttgtaaaaaacacaaaaaatgccgacggaagtattgacagaagtacgaccaacgactatagcgaagcacagagaaccattcttggaaatccgtttccaaccttaatgtcaggacttaccaatacgattttatacaaaggtgttgacttttcatttactttccagggagaatggggtgccagtatttataacactgcgggaatctatcagtctacagcagccgattattttgataatcagactctggatcagctagaccgttggcaaaaaccgggtgacattactaatgtaccacaagcaagatttggaggttcaaacggtacccaaaattcgagccgttatcttggtaaatcagatttcatacgtttaagaaacctgactttaggatattcattacctaaaaagaccgtaagcgacatgggaatgagcaatttaagaatttacatgacggctgtaaatctattgacttttaccaattacaaaggttctgatcctgagtcacgaagagatgacatctcaagagcgaatcctaatattggacaggaattttattcggctccaccagcgagaacaatcgctatgggagtaaatatcaatttttaaatcgatcaaaatgaaatcaaatacgatactattatttatgctttttgcagtcttttttacaagctgccaagacgaattaaacgtagaaccaagacaaagagaagatgcttctattaccttgagtacagaagaaggagttaccaatgtacttaccggaacctatgctcttgccgcaaacggaaatgcttacggaggaagaatcttagtttatgccgatttactgggagcaacaggtgtaactgccactactgattttaggttcagaggaacttttggcgaattaagacaaatgtatattaaaaaaatgcttgccgataacgtaatcatcaccggaacttactcgagatgttacgaaatcataaacgcagccaataccgttattgacaacatcagcaaggtgaaggatccggctaaacaagcccgaatgatcggtgaagctaattttttaagatcacttgcttattttgatttagtgcgcttttttgcaaaaccatacgttagcggtcagcccaataatcaattgggaattgtaataagagacaaagccatttatgatttcaacgtcgatttatcaaaagaaagaagtacggttgctgaagtctacaaagtcatcattgacggattaaatctcgcttacaccaatcttccaaaagacaatagtttttatgctgacaaatatgccgcaaaagctctattggcaagagtatatcttcaacagggcaattacgctttggcaagagacgcagccgatgatgtcatcaaaaatagcggacactctttgtctacaaaatatgcagatgcctttaatcatgacaccgatcaggttgaagacgtttttgctatccaaattacgaaacaaaccggaacaaatgatgccaataccttttatgcagctgagaataatggaggacgcggaggtgatatttcgatcagagatccttatctggaaaaatttaccgatcctaacgacgatcgtgcaaatttcaattatataaaccctgccaatgacagattactgactttaaaatttaccaatcagtttggtaatgtagggatcattcgtctggctgaaatgtacctcatcagagcagaagccaattttcaggccggaactgctgtgggcaacactacgcttgacgatatcaacatcctccgaacaagagccaatgcacaaaaactgaccgcagtaacacttgatgctattttactggagcgccaattcgaattagcgatggaaggcttttcaattcacgacatccgaagaacaaaaggctctattgatgtaagtggcgacggtgacggatctgaattattatcttatgatgccaatgtactggtatttcctattccaatcttggaaatggatgccaacaaaaaaatcacccagaatccgggttacagcaagtaaaattacctagattctcagggactaagatgctgagatactaagatttttttttccggagtgctttaaaaagctccttaaaaataaaaggtgtaaagttttgtaatgaaactttacacctttgttgttttgtgtttttcgtcaaagtttaaaactttgacaaagtttgaaagttctaaagttctaaaaaaaaaacctaaaaatcttagtatctcagcatcttagtacctcagaacttaaaaaaaattaattcttaaaagcattcagtgatttctctataatttcaagacactcctgaatttgagattcggtcatcaccaaaggcggtgccagtctaattttatttccatgagttggtttagccaataatccgttatctctgaatttcagacaaatttcccaagccaaatcagaatcttcaccacaattaatcacaattgcatttaataatcctttaccgcgaaccagcgtgatcagattattgcgttctgcaatttcatttagcccttttcttaaaataattcccaaacgttctgcattttcggcaagattctcttctttgattacttcaagagctgctattgcaaccgcagctgcaaccggatttcctccaaaagtagatccatgttgtcccggtttgattacattcataatttcatcattacacaaaactgctgataccggatacaccccgcctgaaattgcttttcctaaaattaaaatatcaggttgtacattttcatgctgtacggctaataattttccggtacgtgcgattcctgtctgaacctcatctgcaatgaacaaaacattatgtttttcgcacaatgctttggctttcgccaaatatccttcagaaggaacataaacccctgcttctccctgaattggctctactaaaaaccctgcaatattttttgacgactccaatgctttttcaagagcagccagattatcgtattcaatttttataaatccttctgtaaaaggtccaaaatttttgcgtgctacttcatcatttgaaaacgaaataatggtagtcgttcttccgtgaaagttattttcgcacacgattacctgtgcctgattttccggaattccttttacttcataagcccattttctacacactttaagagccgtttcaactgcttcagcaccagtattcataggcaatactttatcgaagccaaaatactttgttacaaattcttcataattacctaatttgtcattgtaaaaagcacgtgaagtcagcgtaagtttctgagcctgatcgaccatagccttcacaatctttggatgacagtgtccttgattaacggcagaataagcagataaaaaatcaaagtatttttttccgtctacatcccatacataaaccccttctcctctttccagaacaacaggaagtggatggtaattatgtgctccgtatttattttctttttcaatcaaaacctctgattttgacgacagggcattttcagtatgaatcatgatcttattttatttaaaattttctaaaagccaaaagtattaaaaatttctcattaaaacctccataattaccagttttgactttaaaaaagacttttaaagtcaaaaacaaaggttttagaggttaaaaaaatcaattttagacatcttataatccccttcaatcccttgttaattaaaaaaaatagttacttttatgaatgcgaaattattgtcgcctatttagagttttttttagaacagctgcaataacataagcattaagattaaacacaaattataagaatggatatattagacgaatttgatattagcatcattaaagaattagagaaagacggaagaatggctttttctgcaatcgctgctaatttgaaaatatcaaacaccatggtgcatcagcgtataaacagaatgatcgaacaaggtgtaattggtggaatcaaacctatcatccaggaaaaaaacattggttatgactgggcgtcttttacgggaataaccctgaataaagattctgattcagaccggattattgaagaattaaaagaaattccggaaattacagaatgctattacgtgacaggatcctttacgctttacatcaaaatcatagccaaaaatcatgaacacatgcgccgaatcctttatgaaaaaatcgatggtattccgggtattgccaaaaccgattcgattattgaattaggctgtgcgttcaaacgaaatatctctttataattactttttaaattttaaaccatgatgttacgaaaactgcttttacttactttgttttgctgtaagtcagccctgttttcgcaaatcgttgttcctggtccgtcaaaaagtgatttctccccgacactttcttttttagcttccgattggatgcagggtcgcggaactactcaaaaaggagcttttctggcctctgaatatattgcttcaatgatggaactttaccaattagttccgtacgacacaaaatcaggatactatcagaatttcaaaattgaagaacacaccgtaaaaaaggccgcacttgaaataaaaaaaaacagtaaagaaacttttcccctttctccaaataccgattttcaggttacccctgtcgcacaatcgttacaaaaagaaaccgaagtcgtttttgccggttacggattaaatctaccgaaagaaaactatgacgactataaaaacctgaatacaaaagataaaattgtcgtcgttctaaaaggcttcccgggacatttggacagcacatcagtatcctatcagaaattcaaaaagtactatcccgaagaaaacaacctcgaagaaattaaacttcaaaccgcgatcagtaaaggagccagcgcattgattcttattgattgcaaaaaatgggtcaaatttaaaaaagaaaccaccttccattccctcgaaaattcaaacatcacttcgattcccatttttgaacttagtaaatcagctgccgaaaaactttttaccggaagtactatctcgttagaacattttgaagaaaaagcggcacgaaaattattctttgctgctgttccgctaaaaaatacgaaaattaatttctctatagaattgcaatcccaaacctttccggttcgcaatgttttaggaatgattccggggaaagacactaccaaaactattattgtgggagcacattacgatcatttaggcatcctaaacgattctatttacaatggagccgacgacaatgcatcaggagtttccggaatgctggcactggccaaaaaatggtccgaaacaaaaacaaaacctccctgcactatattatttgcttcgtggacggccgaagaaatggggcttttgggaagtgaatacttcgttcagcatttggattccgaaaaacaaaaaatactgctcgccattaacatggatatgatttcgagaagtgctcccgaggacaaattacatcgaatcctaagcatcggaacacaaaaggaaaacgtttctttaaaagaaattgccagcctcagcaatacaaaactttcgaaaccttttacactcgatctttgggaaaccaatggacataccggaagtgattatgcttcgtttactgctaaagaaattcccatcatgactttttttagtggttttcacgacgattatcattccaccagagatatcgctacaaaagtagatttagataaaataaaagatgttctctttatcgtcaatacctctcttttaaattttataaaccagttgcattaactccattcaaaaaacgatgaaaaaccaactttccttccattttttctatcaaaaaatcctgatccttatgctactttttacagctagtctgcttcaggcacaaagtcccaaaggcaaactttttatcataggcggcggcgatcggtctgatgccctgatgaaacaggttttaagtgtttctgaattgacaaaaaatgatttcatcgctgttttgcccatgtcaagcgaagaaccggacagttcctttatttttttcaaaacacaaatggtaaaattaactcccaatccaattgtgatgcttaatttcaataaagaaactgctcaaaacaaaaaactgaccgattcacttcaaaaagcaaaactgatttttataagcggtggagaccagacccgttttatgagcgtggtgcaaaatactccaattcaaacggcgattcaaaaagcttatcaaaacggaagcaccatttccggaactagcgccggtgccgctgtgatgtctgaaaaaatgattaccggaaatcagaaactacaaaaagaatattccggaacttttgacaacatccgttacgacaatctcgaaactgccgaaggtcttggactactccaaaccgcaattatcgatcagcattttttaaagagaaatcgttacaaccgattgctttccgcattagtggaattcccttctttaaccggaattggaatcgacgaaagcaccgccatcattgtccgaaacaatcagattgaagttgcgggtgaaagtgaagtgatcgtagtgaaaaaaccaaaaggaattctgaaatctaaaaagaataatctcatttcgattgaaaatctacaaatgagcatttatactgccggacaaaaatttaacatccaataaacatgtttaccaccaaaactataaaattagcctttgtactttgttgcgcaagtcttcctctttgtgcacaaaaaatcaattcaaaagaagccgcacgtctcgaaaatttagcccaacaggttcgtattatcagagataactggggtattccacatgtttatggaaaaacggatgctgatgctgtttttggattactctacgcccaatgcgaagatgattttaaacgcattgaaattaactatattgaaaagttggggcgcctctcagaaataaaaggacaagccgttttatacaatgatttagaaattaaattattaattgacaccgaagaagtcaaagccgattataaaaaagctcccttatggctccaaaaattattaaacagttatgccgatgctattaacttttacctctacaaacatcccgaagtaaaaccggcgcttttaactcatttcgaaccctggtttcctttgctttggaccgatggaagtatcggagccatcagtactgccgatttaacaacaggagaattaaaagctttctattccggtaatggtgataaagtggcgtatgttgaaagagagaaaaatgtacaaacaggttctaatggttttgcatttgccccctcaaaaacagccgacggaaatgctattctatacatcaatccacataccaccttttatttcagacccgaagtacaagtcaccagcgaagaaggcctaaacgtttacggagcagtaacctgggggcaatttttcgtctatcagggtttcaatgaatattgcggatggatgcacacctcctccaacgttgatgttgccgatatgtatgccgaaaaaattgtcgataaaaaaggcaaactattttatgaattcgacaaaaaactaatcccggttatcgaaaaagaaattatactacattacaccgaaaacgggaaattaatccctaaaaaattcaaaacctactacaccaataatggtccgattatggccaaacgtgacggaaaatggattagtttaaaatcaaacaaccgctcgatgaccagtttaattcagagttgggtcagaaccaaatcaaccagttttgaagattacaaaaaagcaatggacttaaaagccaacacttcaaacaataccgtttacgcagacaacaaaggaaatatcgcttattggcatggaaattttatcccaatcagagataaaagcctcaattggtctaaagtcattgacggatcggtctcggctacgcaatggaaaggcctgcataatgtaaacgaaaccgttcatttgtataatccaacaaacggatggctgcaaaactgtaactcaacaccttacactgttgcgggagaaaacagtccgaaaagagaaaactacctgccttatatggcacctgacggagaaaattttagaggaataaatgccgttcgaattttcagcaaaggcagtcagtatactttagacaaagtaattgctgacggatatgatactaaattatcgatttttgaaattttaattccaagcctgattgcggtttacgaaaaaaacaaaacagcatatcctgaattaaatgaagtcatttcgatactcaaaaactgggattattacgccaaagaaaattcagtagccaccactctggcagtcgaatgggcgtacaaattagatccgattatactgaaagcatacgtcgatgaaggagaaccggatcaggtagagaatacccgaaaatttgccacgaatgccaccgctgttcaaatgcttccgcaattacagttagttttaaaagaactgaactcaaaatggggaacctggaaagtagcctggggagaaataaatcgttttcaacgttcaaacggcgacatcgatttaaaatatgacgatgctcagccgagtttaccgatcgcttttggaccgggctcctggggaagtttaccttcctttaaaagcagttatcaaaaagactccaaaaaacgatacggctacaatggcaacagctttgtatgtgctgtagaatttggtccaaaaataaaagcaaaatcattgctagccggaggtaatagcggaaatcctgactccaaccatttcaacgatcaaagtgaaatgtatcgaaaaggaagctttaaagaagtcttgttttacaaagatgatgtgatcaaaaatgccgagaaaacctatcatcccggtgaatgattttcattgtaagaaaataacgtttaaaaaccccggaagaaatacattctgaggttttttcgtaacgtaatatttctgatatttgttaaaaattgtactcttatgaaaaattcggcctttctcttatttgctaccatattgttttccaacggtataaatgcacaactaaaagctgtaaaatacactgacggttctcaggctctaagtggattatttgcaaaatctgctaaaaaaagcactcaaaatccggggattttattgattccggcctggcttggcattgacaaagcctctaaagatattgcagaaaacttatccaaattaggctatcacgttttcattgctgatatttatggagaaggaaacaaacctgccaatacctcagaagcggcaaagcaatccagttactacaaaaataactttgaaatatatcaaaaacgcatcaatgccgcattacaggaattgatcaaatcaggaaccaacgccgataatattgtagccattgggtactgctttggagggaccggtgttcttgaagctgcacggggacatttaaatctaaagggagtagtttcttttcacggaagtttagccagagatgccgcccgtaaaattgaacccatcacaactaaagtattaatttgtcacggagccgacgatccctatgaatcaaaagaagaaataacagctttccaacaggaaatgagagattcaaaagccgattggcaaatgatttattatgccaatgccgtacattctttcaccaatcctgaagcaggaaatgacaactcaaaaggagcagcctataatgctgttgcagcaaaaagagcttttgaacatttgcagcttttcctgaacgaagtattgaaaaagtaagctttaaaactgcaattttaaagaataaaactgacttcaactatatggttttaaaattcagacaataagtgaaattcgcagcaaaaaaatctttttcatctgtgacaaaaaaaagtatcagcattaagccagataattatttttaaaatttacggaaattcgcgttattcgctgcaagaaaaaacaaaccaagaaaaccaaaccaataccatttacaatcaatgtcacacagtccgattagaaaagacaaaacctgcttaaactgcagacacgttgttgaacaaaaattttgccccaattgcgggcaggaaaataccgattcccgaaaaacattccatcatttgttcgttcacttttttgaagatttgacacattatgaaaatgctttttggcgtacgatcaaaaaccttttgtttaaaccatcggcattaaccaaagaatacctttcaggaaaacgtttatcctatttagctcctgttcgtttgtacatctttatcagttttgtcactttcttaatgatcgccttatttccgggccattcaaaagaaaccaccgctgattttaatctcgacataagcaacgaaaaagaagttccaaaaaatatttttacaggagaccttaacgatttaaaacccggagacggttttgatgattttaccaaagagatcgattccgttcaaaaatatgcacctgaaaaggaaaaattagattcgtttagttactggatgattcaaaaagtaaaatatgtaaaagaacacaataccaaaaaagaactcattaacaagttcacagagtcttttgtacataacattcccaaagtactgttcattataatgccattatttgctttctttttatggctcgttcataacaaaaaaagatggtattattttgatcatgggatattcactttacattacttttcgtttttgcttctggtaatcttcttcctatttataattagaagattggttgggttatttggagaagacagtccactatcttttatttcaggtgtaaccgacttttttggaggtctctggatgttttactatttctttccggcacaccaccgtttttacggagaaacaagatgggtttccttctttaaaagcatcgcattactgtttataaattcaattttcatcttattcttactgattttctatattttctatacctttatcaatttacactaaacaacatatgaaaaaaatcataatcctgttattaattggtactgcattttcgtgtaaaaacacacaatcagttaccttaaaagacaattcagatccctctaaatacatcgactttatttctgaaaaagatctaaaaacaatgctttatgtagtagcctctgacgaaatggaggggcgtgaaaccggatcgaaagggcaaaagaaagcaggtctttacatgatcgggcaatacaaaaaacatggaatttcgttccctaaaggtgcaaccgattattaccagcatattcctgcctcatttttaaatgccagacgaaatgaaaacttaccggattcagaaaacatctgggcttatattgaaggatctgaaaaaccggatgaagttttggttatttccgcacattacgatcacgtaggagtaaaaaatggcgacgtttataatggtgctgatgatgatggttccggaactgttgctgtaatggaaatggcaaaagcatttgcaaaagccaaaaaagacggacacggtccaaaacgctctatcctgttcctgcacgttaccggagaagaacacggtctgcatggttctcgctattattctgaaaatcctttattcccaatcgctaataccattgccgacattaatatcgatatgattggccgtcgtgatgtggaacacgaaaaaacaaacaattatgtgtacgtaattggagccgacagactctccactgatttacacaatattgttgtggcacaaaacgaaaaatacactaaaattgacttagattttaaattcaacgacccgaaagatccaaatcatttttacgagcgttctgatcattataactttgcaaaattcggaattccatcggttttcttctttaacggagttcacgaagactaccacagaaaaggtgacgaacctcagaaaatcgaatacgatgctttgactaaaagaacaaaattagctttctccattgcctgggaattagcgaatagatctgatcgcccagtagtggataaaccgattaaataaggcgctaaggctctaagcaacaaaggttcaaaggttcagaggcttttaaaaataacaaacaaaaaacgaggagctaaaactcctcgtttttttttatacttcccaatcattctttaagcttgaaatccagctaaaacctttgaacctttgcaactctgaacctttgtatcttttaattaacgaatagatctgatcgcccagtagtggataaatcgattaaataaggtactgagatactaagatactaaggctctaagcaacaaaggttcagagttacaaaggcttttaaaaataacaaacaaaaaacgaggagttttagctcctcgttttttttatacttcctaatcattctttaagcttgaaatccaactaaaacctttgaaccttttaattaacgaatagatctgatcgcccagtagtggataaatcgattaaataaggtactgaggtactaaggtactgaggtactgagatactaagatactaagatgctaaggctctaagattttttaagtgctgagaaactaagttatcactttattctataaataggaggctgtctaaaaagacagcctcacttatttctcctattacttaaagattattcttgcatcatagagcaacttttagataagccatcccaatgatttcttttttatgcgggtactcctgattttaatttctgtacaacttccaaacatctattttcaaaaattgactgctcaactggcacaacaaccgattgaaataattgcattaaatcatccgaatgatttgctgatttttttgtcgcaatattataatgaataaacctgatccataaaattgcttttaattccgtttcattttcattccacattttcatttcaaccaacaaagcattatcgcgatactcaatcaattgcgattcaatcagggtcgtttccatcgtaaaagccggacgtatataactaatctgactggatgctactacccagctcaaaccagtttctttcagatatttaaaaatatccagatcgtaatgttctgcaatctgatcttctcttgtattaataaaatactccagatactttgcgttgtttaaatgattaaaaggatcacaatcctgaaatctgattttcttttttgtttttaatactttttccattttctgctttttttatcaaataccaatcggtatctgaagggttaaaaaatttttatttcctaattttatcaattatcgcatggtctataaaatccatagcagtggtgatgtatgtcccatcattatgcgtaaaggccaaaagggagcttccttcaattaaagtcaataatagctttgcatactgcagcggatcaatattctcctgaatttctccacttatactaccttcactaatgatattggaaagtccggtgataaatttctgagacaaattctgagcactcttaaacaacagtggattgataaatttagcatctactcctacacgcagcattggacaaccacctctgtctttgactacatcataatagctcctttgatatttcgttatcgtgtaaagtttctctaaacttcctgtagtagaagccagtattttgaataaaggcgttatcgctacctctacattcaattgaaaagactttaaagctaactcttctttatttgcaaaattgcagtaaatagcccctttggtaagtcccgtagccttggtaatatccgaaagactggtacccacatatccctgtctgttaaaaacaggtgctactttatccaatataaattcagaagtgttcattattttccagttttcaacaatcgttctccaaacaaatataacacaaataccgatcggtatttaatattaaagctttttttttctaaacataaaaagaaaggggtgaattctttgaattcacccctttatatattttatcatcttaaaagattagtaaccaagaaatttaacggtagtaaaaaaacttagcatctcagctcctcagaatcttagcccctttttctagtcattcatcgaaatcaaaaactcttcgttgtttctggttttcttgaaacgatcgtttacaaaatccatagattctaccggattcatatcagacaggtacttacgcatgatccacattctttgtaatgttttctcatccagtaataaatcatcacgacgtgtacttgacgaagtaagatcgatagccgggaagatacgtttgttagcgattttacgatccaattgcagttccatattaccggtacctttaaattcttcaaagataacttcatccattttagaacctgtttcggtcaatgcggttgcaataatacttagtgaaccgccattttctacatttctagcagctccaaagaaacgttttggtttttgcaatgcattagcatcaacaccaccacttaaaactttacctgaagcaggttgaacagtattgtaagctctcgctaaacgagtaatcgaatcaagtaaaataaccacatcatgtccgcattctaccaaacgctttgctttttcaagaacgatattcgcaatcttcacgtgttcttgtggttctctgtcaaaagtagaagcaataacttctcctcttacactacgctgcatatccgtaacctcctcaggacgctcatcaatcaaaagaacaataagataaacttcaggatggttggctgcgattgcgtttgcaatgtcttttagcaacattgttttccccgttttaggctgagcgacaatcataccacgctgtccttttcctattggagaaaacaaatcgataatacgggttgaaactgaactgcctttttcggctaatttaaatttttcagaagggaaaaccggggtaagatgttcgaaagaaactctgtcacgaacaacttgcggatcatgaccattaattttaagtacacgaacgagagggaaaaatttttcgccttcttttggaggacgaactactccttttacagtatctccggttttaagaccgaacaatctgatttgtgacgttgataaataaatatcatcgggagaggctaaataattataatctgatgaacgtaaaaatccgtaaccatccggcatcatttcaagaacaccttcactttcaataattccgtcaaactcaaagtctgaatctctgaaattattctttttatttttatgatttggattttgattcccgttgtttccgttcccgttttggttagaatttggattctgatttgggttttggttgggattctgattcggattttgatttttattctggttcggattaatcttcttggtctgaaccggtgcttctgttttttcagcagcagcaacttctgctgtaacttcattttccggaactacatctttcgtagcctccttttcttttttcaaagcaacctttttctcgtaagccgatttactaaactttacaatttttggtccttttttctctattgctgcatcttcagtattctcagtactttcggtattctcaatattttcctgaacttccggtgttatttcaacgctttttacttctgctgtttcttttgctgctgcatttccttttatctttggatttgttttaggatttgctttaatagccggagttttagttactgctatcggagcttcctctttttcaggagtttcctctgctttatcaaattccagaaccggtgcattcttatttgctgctgtcttttttgccggaacaattcttgctcttttcggtttttcatcaactatttccgcttctgccacaggactaaccggcggcgctacagtcgcttcctgatgtgctaaaatctgacttattaaagtctcttttttaacgccattaaactttatagttttagctaacttagctatttcttgaagctcagaaagcttcatttcttttaatgcagaaatatcaaacatgaatgttctatgaatttaattattttaacggaaatattgtaaaaagaataggtagatattttttttcgattgaccgcagtatgaagtgcttacggtattatgatgcaataatacgaataaaatttaatcatacaatagtattttaaaaaaagaaaatatatttttgtaaaacaattttagaccatgatacaacgaattcagactgtatatttaattcttacctttttaatcacgggggtattactgttttttactccgctttggaccttaaataatggtaagcctttttactttatgcaggataagttttacacgatattattaggtctgagtacaatgcttacgatcattagtatcatttcatacaaaaaaagacaaaatcagtttgtaatgggcaggctgaacataatattaaatttaattttattgggattatttgtatatcgttctctaaatttatctggagatactactaccattgtatcagagaaaggtattgggatgtttctacctattgttgctatcgtattattagttttagctaataaggccatcaaaaaggatgaagatcttgtaaaatctgtagaccgtttgaggtaaacctataaacttaaattttttgtgcgaagagaacccgaattttaaattcgggtttttttgtgctctaaattttctgtaatttcctgcatgacagtcaaaacaaacctaaaaaaaaactttgtaagatattttttcatttatttgcatatcagttccccgaataattatgaaagataaaataagaatacacctggccgatgatcatcaggtacttattgatggccttagcaacttattgcagacggttgaaaattttgaagtagtaggcaaatcatacgatggcaatactgtttatgacgatattacgctaaacaatcctaatattctgattctggacattagtatgcctaaaaaagacgggatcgaggtagttaaagaacttcagcaaaaaaatgtaccctgtaaaatcatcattctctccagctacgacgatctgaaaattattaaagaagtgatgaaactgggggtaaaaggctatctcacaaaaaaatgcgcgggagaaaatattatagaagctgtagaagccgtttatcagggacaagaatattattgtgatgccgttagagaaaaaatctttaatattttctctcataacaatccaaagctcaataaaaatatcaaagtagacaacccaattctaagcgcccgtgaaatcgaaatcatcactttaattgcattggaatacagtggaaaagaaattggcgaacagctctttatcagtacaaacacggtcgaaacacaccgaaaaaacatcatgaagaaactgcagataaaaggttctattggcttggtaaaatatgccctgaaaaataatttgataaattcctgatcattctcagaaaacacctgttactatgtcctttttcagatactttatatttttcctccttttaaccacttttaatagctatcctactgttgctcagaaaaaaacagttacagaaaacaacactgatgcagttgtcggcaacacaaaaaaaaacaatacttatcttcctgaaaaaataagaaacaaacaaataataagtttatcaatcgtgatgataatcctcttgttctttttattttattttttctaccaaaacaacaaactaagacaaaaaattaaacggaaagatgccaagcaaaaaatattactaaatgtaattaatgccggcattgacagccaggaagttgaacgtaaaaaaatcgcatcatttttacatgacaacattaattctttattgtcttctgttggactgcatttaaaaactttcacaacacaaaacgatataaaatcggacgaaattcagaaagcaaaatctattctacaggaagcacacgatcttttacgagatatgtcacacgacttggtccctacacttctggttcgttttgggttaatttatgctttggaagatctatgcgaaagaaactcgaattctcacataagttttaaattttcgagcgccatttcaactaaaaaaagatacatcgaaaaatttgagatgaagctttattttattgtttcggaacttttcaataacattataaaacacagtgatgcccaaaaagccaagattttcctatccgaaaaaaacaatcagtttatcattgtaattcaggacaacggaaagggttttgaaaccgaaagattaaataatgttgaaggttttggacttaaccgaatcagggcaagaatcaaaaaatacaaaggaagtatctcaatcacttcaaaggcaaacgaaggaacctctataaaaatcaaggttccactaccattttaaatctgttactttttacccatttcaactatttccagatcctttattttatcaccgtcaattacaaatcgcaacattgttcgaacctgatgaaatccgctttttccggccgctccgggattcatatgcagcagattattttttttatcaaacataactttcagtatatgtgaatgcccacagataaataatttaggcggatccgacgccatctcttctcttatattgggattatactttcccggatatccgccaatatgtgtaatccacacggaaacatcctcacataaaaaccgattgtgtaaaggaaattctaatctcgcctgcgcatcgtcaatattaccatatacacatcgcagcggctttaactttttaattgtatccgtaacattcagatcaccaatgtctccagcatgccagacttcatcggcctgagctacatattttaaaatagtatcgtcaatatgactgtgtgtatcggaaaggagaagaatttttttcattcgaaggttcaaaggttcaaagaagcaaagatacaaaggttttttttaaagggactaaggtgctaaggttctgagatgctgagatactaagatgctgagatactaagatgctgagacacttagaaacctctgctcctttgtacctttgtacctcctaaacaaaaaaacttagcaccttagtatctcagaaccttagcacctttaaaaaacttaacatcttagtatctcagaaccttaacatctttttttaaaaaacctttgtacctttgccccttagagcctttgtcccttaaaaaaacctttgcacctttaccttgagatattttattcaatttgcttataacggaactaattatcatggctggcaatttcagcccaatgcttcttctgttcaggaaactttaaacaaagcactatccattttattgaacactcccataaacgttatgggtgccggaagaacggatacgggagttcatgcggaagagatgtatggacattttgatattgaaagcccgctggatattccaaatttaatacacaaactcaactcctatttacccaaagacattgctgtttttaatattcttctcgttcacaatgacgctcattgccgatttgatgctactaaaagaacctacgaataccacatcaacacggttaaaaacccttttttacaggaattgagctggtatttcaatcaaaaattagatgtagatttaatgaatgaagctgcaaaaattctactgaatcataccgacttccaatgcttttcaaaagtaaataccgatgtcaatacttttgattgcacgatttttgaggcgtattggaaacaagaaaacaataaactaatttttaccatctcggccaatcgttttcttagaaatatggttcgctcaattgttggaacactagtaaatatcggcttgtataaaatttctctaactgattttgaaacaatcatcgccagcaaaagcagagaaaaagccgggttttcggtaccagcacacggattgtatttaaccgaaattaattacgattacttatcgctgtaggccataagccgtaggctgtaggcttttgcctaaagcttattgcctaaagcttaaagcttaaaaaaaataaatgaaagcaaaagcatttgataccggattattcaaacgaatcttaaaatataccaaaccctataaatggcgctactacggcgttattatttttgctgtatctctttctatttttgcagcccttcgcccctatttgctaaaacaaacggtcgacggctatatcaagacacacgacaaagaaggtttacttctttatatccttttaatgggagcggttcttttaatggaagttttctctcagttctatttcgtctattgggccaattggcttggacaggatatcgtaaaagacattcgtaccaaactttttaaacacatattaagttttagaatgaagtactttgacctggttccggtgggacaattggtcacaagatccgtttcagatattgaatcgattgcccgtatttttagccagggactttttatgatcattagtgatttaatgaaaatgcttgtcgtccttattttcatgttttacatgaactggaaattaacgtggatcgtagtcgttgccatgccgattctggtttacatcacccgaatattccaacgtaaaatgcaggtcgctttcgaagaagtccgaacgcagattgccaatatgaactcttttgtacaggaacgtgttacaggaatgaaaatcgtacagcttttcaatcgcgaacaaattgaagctgataattttaaagagatcaataacaaacacagagttgcctggattaaaactattttatacaactcgatatttttcccaattgccgatattatctcttctattaccctaggagtagttgtcgtttatggcggattcaaaatcctgaacggagatcattttacaactttcggagatttgttttcctatacgatgtttatcggaatgctgttcaatccattacgccagattgcagataaattcaacgagatgcaattaggaatgattgccgccaatcgtgtttttgacatcatcgatactcaggatcatattcaggataccggaacaattgaagctccaatttttgaaggaagtattgaatttaaagacgtccgtttcagctatattccggaagaagaagttataaaaggaattgatttatctgtcgcttcagggcaaactgttgctattgtaggctcaaccggagcaggaaaatcgactataattaatttactgaatcgcttttacgaaattaatagcggtaccatttgcattgacggtcataatatcgaaaattatacgctggcctcgcttcgaaaacaaattgctgtggttttgcaggatgtctttctgtttgctgataccatctacaacaatatcactttacacaatcccgaaattagtcgtgatcaggttttagaggctgctaagaaaattggcgtgcacgatttcatcatgagtctgccggataattatgattttgatgtaaaagaacgaggggttatgctttcgtcaggacagcgtcagttaattgcttttttaagatcatatgtcagtaatccgagtattttaattctggatgaagcaacgtcttcaatagatacctattctgaagaacttattcagcgtgctaccgaaacgattaccaaaggaagaacttcaatcatcatcgcacaccgattggctacaattgtaaatgctgacaaaattgttgtgatggataaaggcttaattgtagaacaaggaactcatcaggaactactccttaaaaccgacggttattataaaaacctgtacgactctcaatttgctgtagcgaactagattttgaaatgctaaaaaagttcttaaaaaagttaaaatagcgttataagaatcataaatctgctgattcacagactttaggatagcactcttcttttttgaattatttatctttgagagacaaaattcaaatgcaaaagaaaatgccacaaaatagattttatccaaacgaagaattcaaagaaatagaaataaacgcctcactacaacttaaatatgctatttcaaacaaaggccgattaattagttttacagatgaaattcaaaacggacgtattctaaaaggcggtttaagcgatggttatcctacttttagatttaaggttaaagatgatgacaaaattgtcaacaaatatctttttctgtacaaattagtcgctcattatttcattcctaaagaatcagaagaacaaacttatgtactccatctggattacaaccgcagcaacgatgatgtaaaaaatttatgctgggcaacaaaagccgaaatgatggcgcacagccgtaagagtccgcatgtgattcaggcaaaaaagaatctgatcgaacacaatttaaaagccgacggacgaaaattaacgactaccaaagtcatgttaatcaaaaaaatcctcgcacgcccggaacaaaaaacacgtctgaaaatgattgccaaacaatttggcgttagcgaaatgcaaatacgacgtatcgccagcggtgaaaactggggccatataaaggtctgatacctacaaaaatcattatattattatcattatccggagcttcttaaaaggggctccattttttttgcataaccaccaataaacaaatctctcatttttaagtatttagaaaaccttcacaacaaaacattaaaatccagaatcaaaaaaggcagaataataggattaatacttttattaattgtaaacttgcataccaaattcaaagataattttatgaagaaaaaactacttatcttactgtgttcactcagtttatctgcttttgcacaaactactttaatccctgatcaaaatttcgaacaaaaactaatctctctcggattggataccgttcttgatggaaaagtgctaacttcaaacatttcctctgttacttctttggatataagtttcagttctattaaaagtcttagaggccttcatgcttttactaatcttgagactttaatttgttccaacaatgaaataatcggtttagactttcctaataatcctaaactttctactttgatttgtcattccaataaaatacaaagtttagatgttagtaaaaacccccgcctgcaaaatttagactgccaatccaatgaaataaattatttggatatatcccaaaatacttttctaacacagttaaattgttctaaaaataaactgagttctttaaacacttctaaaaatttaagacttaagggactgtattgttcagataacatactgaattctttaaaccttagcggcaataccttacttactgaacttaactgcaatactaacaggattaaaagtcttactatttccgataacacgggtttaatagatttatattgcgaaaacaaccgaataactactttggatctttctaaacagaaagagcttaaaaatgttaatttgaagtctaacgatcttgtaaatctcaatataaaaaacggcaacaatacatccttaaatgtcaataatctaaatttagcacacaattcacagttgttatgcatacaagttgataatgtaatgtactccagtatgaattgggaatacgtaaaggatcttcaaacaagttattctaccgactgccctacttatactgtaatacctgatactaatttcgaaaatgctcttattgctttaggaattgattcagggacccctgacagaaaagttttaacttcaaacgtttctactgtaactacactagatttagggattaatacaactattacagatctaaccggaatacaagactttacagcacttcagactctaatttgtcgtggaaatacaggtcaggtaatcaacggagggaacggaaaattaaaaattcttgatatttctaaaaacgcaaacctgaccactctggattgctcctataaccagcttataaatttagatgtcaccaaaaatcctttactggtttcgttaaaatgtaacgtcaatagatttgataaaattgatgttactaaaaatgttaatctggattatcttgatgtaagcagtaattctatttttcaactcgacgtttccaaaattccaactttgcgttacctgagagctgacaacaccaaacttacctcactagatgtttcctctaatcccgcaatggttggattattttgtaacaattcagatttaagaagtttaaacttaaaaaatggaaataaccaattaatttcagcacaagatataaactttaagggaaacccaaatttaaactgtattcaggtcgacaatgccgtaaatgctactgcaaactggtctgcttccaaagatgccgctacaaattattcaaccgaatgtctaaatgattcatttacattgattcccgacagcaactttgaaaatgcacttataactttaggaatcgatgctggagttccggatggaaaaatcctgacttcaaaagtttcttctgtcacgaaattagatttaggaaccaatacaactattacagatctgaccggaatacaagatttcaaagcccttgagtggctggtttgcaaaggaaatactggtcgtgcaggtgatggtggaaacggaaaactaaaaacacttgacgtctccaaaaatacaaatctaacgattcttgaatgctcttttaatcaacttaccaatttagatgtaacgcataacccattactgcgttccttaagatgtagtgtaaataaattaacagcaattgatgtttctcaaaacacaaaactggatgatcttgatgtaggcagtaatcaaattactacgcttgatgtctcaaaaattccaactttacgttttctgactgccgaatctactaaacttaccacattagatctttcctctaatccggcactggttggattattttgtagaagttccgatttgacaagtttaaatctaagaaatggtaaaaaccaattaattgtaccgcagagtataacctttaccggaaatccaaatttaacttgtatacaggttgatgatgcagcattttctactgcaaactggtctgccgcaaaagatccggcagcaaactattcaaccaactgttcgaatggtttatttacactaattcctgacagtaatttcgaaagtgcccttatttccttaggaattgattcaggtgttccggacggaaaagtactgacttcaaacgtttcttcggtgacaaaattagatttaggaaccaatgcaaccattactgatctaaccggaattcaagattttacagcgcttcaacggttaatttgtcatgggaattttgggcacatggatacaggtggaaatggaaatttgactactattgacgttactaaaaacacaaaactaactgttcttgacatctcgtacaataaaattacatctttagatgtatctaagaatccgttactgatttcattaaagtgcagcgtaaataaactaaccaaaatcgacgtttctcaaaatataaaactggataatcttgacatcagcaataattatattacacagcttgacatttcgaaaattccaactttacgttacctaagcgctgattacacaaaacttacatcactggatatttcctctaatccggtaatggttgggctatcttgtaacaattcgactttaacaagtttaaatctaaaaaatggacaaaatcaattgattgcagcacaaagcataaactttatggaaaatccaaacttaacttgtattcaggttgataatgccgtaaatgccactgcaaactggtctgctgcaaaagatgcttctgccaattactcaaatgaatgtcagactggtctgtacactcttattcctgacagcagtttcgaaagtgctcttatttccttaggaattgattcaggtgttccggacggaaaagtactgacttcaaacgtttcttcggtgacaaaattagatttaggaaccaatactactattacagatctaaccggaatacaaagctttacagcacttcaacggttaatttgtcgtgggaattttggcggtgcaggtaatggaggaaatggaaaattgactactgttgatgtttctaaaaacacaaaattgactgttcttgatatctcgtacaataaaattacatctttagatgtatctaagaatccgttactgatttcattaaagtgcagcgtaaataaannnnnnnnnnnnnnnnnnnnnnnnnnnnnnnnnnnnnnnnnnnnnnnnnnnnnnnnnnnnnnnnnnnnnnnnnnnnnnnnnnnnnnnnnnnnnnnnnnnactggataatcttgacatcagcaataattatattacacagcttgacatttcgaaaattccaactttacgttatctaaatactgactatacaaaacttatgacattagatctttcctctaacccagcgttagttggattactatgtaataattcggctttgataagtttgaatctaaaaaatggacaaaaccaattaattgcagcgcaaagcataaactttaaaggaaatccggatttaacttgtattcaggttgatgatgcggtattctctactgcaaactggtctgccgccaaagatactattgtcaattattcaaacgaatgtcctactaatctgtatacactaattcctgacagtaatttcgaaaaagctcttattactttagggattgattcaggaattcctgacggaaaagttttgacttcaaacgtttcttctgtaacaaaattagatttaggaaccaatacaaccattacagatctaaccggaatacagaattttactgcactaagacacctaatttgtcatggggattctggtaatgcaagtgctggaggaaacggaaaactaaaaacactcgatgtttctaaaaacatcaacctaacggttcttgattgctctagtaaccaacttacaagtttagatgtaactcataatcctttattacgttcattaatttgccgtgtaaataaactaaccaaaattgatgtttctcaaaacacaaaactaaatgattttaatatagacagtaataacattacagcgcttaatgtctcagaaattccaactttaagtgtcctgagtgctaactacacaaaacttacgacattagatctttcctctaacccagcgttaactggaatactttgttacaattcggctttgacaagtttaaatctaaaaaatggacaaaaccaattaattgcatcgcaaagcattagatttaaaggaaatccaaatttagcctgcatacaggttgataatgtcgcttactcaaatgcctattggggtgccgcaaaagatgcattggtaaattatgctaacgattgtccgtcaaccactttatatactcttattccggatattaactttgaaaatagattaatttcactaggaattgattcaggggtagccgatggaaaagttttaactacaaagattaataccgtaacaactttagatgtttcatcgtcaaacttatcaagtctgacgggaattgaaggttttgtcgccttgaaaaaattagactgtttcaacaatcaattaaccactttaaacttatcccaaaatacggcattagaaatcgtaacctgccaattgaataaattgtcaaatatagatatctctaaaaatactgccttgaacgaatttacatgcaacagaaattcattaacaactttagacgtttctaacaattcaaatttaaggcttttagattgtggcgaaaacaaattaactaacctagacattagtaaaaacagctcgttagaaattgtattctgccttaaaaatgaattgaccactttagatttttctaataaccctaagttaattaccttaaattgcgattataatcttctgcaaaccctcaatgtatcagcaaatactaatttgggccttttgtcttgtcataccaatcaattggcagctttagatgtctcaaaaaaccaattattagagacggtatactgcggtgaaaatttattgaagactatagacgttactaaaaacttaaatttaaaggccttaggttgccaaaaaaatcaattaacaaatattgatatttcaaaaaatactggattaggctatcttaattgttctaataatcaactaacaaacttagacgtaacccagaatcccaatttatcttcgatacattgctattttaatcaattaaaaacggtagatgatataggacatacctatttttttaagaatattaaatatcacttactatttagaaatcttttctttaaaacaggtctgattttattaaatcaacagattttaaaaccataacgttaaattacttattttagacctgtccaaaactcatcaaaatgtcttctgaattacaaacgaaattagattacgtaaaagcttatcgggaaaaccgtcttactgttgcaaacgaagttttagaaaacccacccttatttaaagaacttgtttccatttgtttttccccatcagacaaaaacaatcacaaagcctgctggattatggaatttgtttcatacgaagaattgatctggctgcaaccgtatcttgattttttctgttcgaatttgaaaattttaaaagacgaaagtgccatccgccctatcgcaaaaatagttcagttactcgtaaaagctcactatagcaaaattgaaaaaggcatttctctttccgaaactaatttgcaggattgtatcgaagcgtcatttgactggcttatcaatgatgtaaaagtagcgaccaaggcctactcaataagaactttatacctactaggcaaccattatgactggatacacccggaactgcaagttattctgaataaggactatggcaatcattctgctgcttacaaagccgttgccaaagaagttttaaagaaaatcgagtagttttattacgcataaaccctatccagattgtattaattatattgttcttaaaattattacctgaaaaaatttgtgaatttagtgcaattcgtggcaaaaaaacgattaaaaagtatctttgcaaaaacacaactacaatgaattatttttcttctgattttaaattaggaatattaggcggcggacaattaggtaaaatgctcttgtttgacacccgaaaatttgacatccaaacttatgttcttgacccaagcgacgaagctccaagtaaatttacctgcaataaattctttcagggggatttaatggattatgaaacggtttataattttggaaaacaagtagatgttctgacttttgaaatcgaactggttaacctggaagccctgacacaattagagaatgaaggattgaaaatctatccttcacctaaaaccttaaaaggaattcaaaacaaaggaattcaaaaacaattttacgcggatcaccatatcccaacagcaccatttgagcgctttgaaaatttagcaggtcttaaagctaaaattcaagatataaaactaccatttgtctggaaatgcactgagtttggttacgacggaaacggcgtaaaagtaattcgtcaggtttcagatctggacagtttgccaaatgtagaatgcattgcagaaaccatgattccgtttaaaaacgaattggctgttattgtctgtagaaatccatcaggagaaataaaaacgtatccggttgttgaaatggaatttcatccggaagccaaccaggtagaatatgtaatctgtcctgccagaattgaggagaaagtagcccaaaaagcgagagcgattgccttaaatgtttcggaaaaattcaatcatgttggtcttttggctgttgaaatgtttcagactaatgacgatgctattttagtaaatgaagtagctccgcgtccgcacaattcaggacattactcgattgaagccagttatacttcgcaattcgaaaatcatttgcgtgcgattttggatcttcccttgggaaataccgacagtaaagttgccgggattatggttaatttagtaggtgccgaaggattttcgggagatgttgtttatgaaaatatcgaaaccattttgggatggaacggtgttaccccacatatttacggtaaaaaacaaacacgccctttcagaaaaatggggcatgttaccatcgtaaatgaaaatatgtcagaggccagaagaattgccgaggatgttaagaatacgattagagtgattagtaattagttgccgttttcagcaacagtcaacagtctgaaacctgaaacagaacaagtagttttcattcacagtcaacagtttacaacaacttgaatcaaaaatattacaaatgggatttcttgatcttcttgatttattaaacaatgcttcaaaggcaggtaaaacccaaaatttaactaaaaattacgttgaaaagtttattgataaaaatgaatatgttggtgagagaatcaaatattttattggattcttatttataacattgttcttaattgtattaggtcttggaattatatttttaatttttaaaaccataaaacagtcttaaacaaaataacttctaaatttcagttttgatcaacctgaaacttgaaacctgaaacctgaaacaaaaaaaacctgaaacaaaaaaacaaaatgagttcagtagccatcatcatgggaagtatctctgacatgccggtcatgcaggatgccatcgacatattaaaacaatttaatgttgaagttgaagtagacatcgtttcggcacaccgaacgccggaaaaattattcgatttcagtaaaaatgcccacactcgcggaatttcggtaattattgccggagcgggaggagctgcacacttgcccggaatggttgcctcaatgtcgccgcttccggtaattggtgttccggtaaaatcaagcaattctattgatggttgggattcggtactatcgatccttcaaatgccaggcggagttcctgttgcaacagtagcattaaacggtgctaaaaatgccggaatcttagcagcacaaatcattggaagtcacgataaaaaagtacttgatactattatttcgtataaagaagaattaaaagcggcagttaataaagctgctgagagccttaaatagttttcagtctcagtctcagtaagcactaaaaattgagactgaaaactgagactgaatattcaaaaaaaataaactctttagtctcagttcgcactgaaaactgagacggagactgaaaactaaaaaaaatgagcatcttaacacaacatttcaataccaaacacaatacagcacctttttcgcagattaaaatcgaagattatgttcctgctttcaacgaagcaattgctttggctaaagccgaaattgatgccatcgtaaacaatcccgacgaaccaacttttgaaaataccgttgtagcaatggattttacaggtgatgttctggatcgtctttccagtattttcttcaatctaaattcggcagaaaccactgatgagatgcaaaaaattgcacaggaagtttctcctttactttcagagttcggaaatgacattaccttaaatgcagcattatttgctaaaatcaaagccgtttacgagcaaaaagaaaagctgaatttaaatccggagcaaactacgcttttggataaaaaatacaaaagcttctcgagaaacggagccaatttacctgaggataaaaaagaaaacttacgtgaaatcgataaagaattgtcgaaattaagtctgcagtttggcgaaaatgttttggctgaaaccaatgcttttgagttccatttaaccgacgagaaagatctagctggtttaccggaaggtacaatcgaagcggcgagattattagctaaaagtcaggaaaaagagggctggattttcactttagattatccaagttatattccgtttgtaacgtatgccgacaatcgtgaattacgcaaaaaaatggcgattgcctttggtgcaaaagcttttcaaaataacgagtttgacaatcaggagaatgtactggcaattgccaaattacgttttaaaagagccaatttattagggtacaaaactcatgctcattttgttttagaggaaagaatggccgagagtccggaaaaagttttctctttcctaaatgatttgctggctaaagcaaaaccggcagctcaaaaagaatttgctgaactagcctcttttgccaaagatttggacggaattgaacaattggaaaaatgggatggtgcttattattctgaaaaattaaaacagcagcttttcaacttagatgacgaaaaactgaaaccttattttcaattagaaaaagttttagctggagcttttacggttgcccaaaaactttacggattaacttttaccgaagtttttgatatcgacaaatatcacgaagaagtgatgacctacgaggtaaaaaatacagagaacaatttagttgctattttttacgcagattttttccctagaagaggaaaacgaaacggagcctggatgacctctttcaaatcgcaatctataaaagatgggacaaacgaaagacctcatatttcgaacgtttgcaactttacaaaaccaacagaaaccaaaccttcgttattgacttttaatgaagttactactttgtttcacgaatttggtcacggtttacacggaatgcttgccaacaccacttaccctagcttgtccggaacttctgtattttgggattttgtagaattaccaagtcaaattatggaaaactggtgttacgaacctgaggccttggctttatttgctaatcattacgaaacgaatgaaattatcccgatcgaatatgttcaaaaaattaaagaaagtgccagttttcaagaaggtcttgccactttgcgtcaattgagttttggtcttttggatatggcctggcacgggcaagatccgacagctattacagatctaaaaacttttgaaacagagcaatttgcaaacactcaattataccctgatgtaaaagagaatgcaatgagtactgctttttctcatattttccagggcggttattcttcaggatattacagttataaatgggcagaagtactggatgctgatgcttttgaatattttcaggaaaacggcatcttcaattacgaagtcgctgcaaaattcagagacaatgtactttctaaaggcggaactgagcatccgatgactttatacaaacgtttcagaggtcaggaaccaaaaccggaagctctattgaaaagagcaggattgctttaagatttttagacttcttaacgtattagatatatttaaaaccgaggtagaaatacttcggtttttttgattcgatctagctacaaataccataaataattttacttatcttcaccatttttttaacccatatcttcgaaattcaaattgaaaaaacttctcaaaaaactaatttaccttttcatcattggggttattgcaatcatttctgttaattggtatgttaaatcctcaactagtaatttgatttatcacactgtaaataatattcccaaaaatgaagtgggaattatttttggagccggaatcaacggtgaccagcccagtaaatatttaaaagacagactggatgccggaatcctattgtataaaacacataaaatagataaaattctgctttcaggcgacaatggcagagatgaatatgatgaacttaccgttatgaaaacatattgtttcaaccacggagttgacactgctaaaatatttattgattacgccggttttgacacctactcaactatgtacagggcctcacatatttttaaaacaaaaaaagcaactttaatttctcaggaatatcacttgaacagggccatttacattggacaaaaactgggagtagaatcaattggattttctgccaacaaaggagaatatctgggatatccatatgtaacttttagagaatacggttctatttttaagtctttttttgatgttttaagaaatcgcgagcctcgttttttaggaaacgaaattaatattaatggtgtttccaattattcaaaagaggataaacgataacaaacactttttttgcttcccaaaaaaattctaacactatctttttaaagaaaaatgacttctaatctgttttgcaatacctgggttatttatttcttcataagttagaacaaaccagtaatctgaagcaaaaacaggactgttcctataagtaccattccatcccggagtatctttagtcaaacgagtgatgaacttaccatatctgtcaaaaatatcgatctctaatttattaaaaatctccaaattatttacatgccaggtatcattatatccatcactattaggcgtaaaaaacttaggataatcccattcggttaactcaggtttttctaactcacaatcttctttgtttaaaaaaatcacttttgccagaggcgaaaataaataacatcctttactggtaataatattaacggtataatttccttcctgagttgcaacataagtattcgtattggctccgaagatagcagtatcatcaacttcccattgataagacttaatgatatgattggaaggaatattcacctctaaaacagtactgtcccctttgcaaatcattagatttccttcaattacagcctctactaacactgtattctcttcaataatcagaacgtcatccattaaaagactacaacttcttgttgaaattttggttaatcgataagttcccaccggagccggagactctattactataaataaacctttactatcaatagtcaccggagattgaactatcccatttaattcataatcgattgtaaatggccccgaatctttacttgtaatttctacctgaatacctgaattctctcctaaacaagaatctcccccatatttgactaatttagcgtttgcagtaaatggttcttcattatcaatcacaagaatattatctaatgaaaagcggcatcctctagttgaaatttctgtaatttgatagattccggcctgagctggagctgttactaatgtatataaacccacatcctctatagttacaggagattgcagtattccgttaatttcatactctattacaaaaggacctgaatcggggctcgtaatttctacctgtactcctgaattttctcctaaacaagcattccctctgtatttaattaggctcgcactggctttagggggtactcctccataaataattaaagtatcatccagtaaaaaatcacaacccccaactgaaatttttgttaatcgataagttccaacatttgccggagccattattaatctgtgcaaacctgcactacttatcgttacaggagattgaccgattccgttaatttcatattctattttaaatggtcccgattttgtacttgttatgtttacctgaatccctgagcctaaccctgaacaagaaactcctccatatctcattaatttagcaccggctgataccggaattcctttatcaataacaatggtatcgtcaagcaccgaattacatccgcctgtagaaattttagtcaatcgataagtcccttccttagccggagccactattaaggaatacaaacctgtattgtttattgttacgggagattgagccactccgtttatttcatattctattgtaaaaggaccggatccggtacttcttatttcaaccttgacccccgctcctgttcccgtacatgttcctcctccgtctttaactaattttgctgatattgcaactccaacattttttatttctataggctcgcacacaacttctccggcagaattagcatcactgatcgcaataatagcatatgttccttctgacaaggatgccggatttatcgaataaggattttgtgaagtggttatttcgggataaacaatttccggagatacatctgttctcttataagtaaatttatagggagctgtccctgagaaataaaccgttaatcctaaatcttttccgcaacctccgtcaaatccttccattctggctgtaggagcaaaacaaccgtttgattcgttaccatatgtttcagacattccttttttaggatcaaaggctggtaaaaagacaactattgcttctactacatcatgcatctggtatctgaaagatatagaattccctccattgatacgatcaaaaacgggtttgattgtggctctgaaatttgcttctgttactccgaaagcagcataaaacggcgtaactttttttatatactcgtctacgtcactccattcaatttgtgagtcataaaatcctctaaatgtatgagccgatctatcggttactccccaaatagcagcatcagtccagctgatatctgcgaccctgtcgtctaatacttttgtcagcctgttaatttgttctgcataaagccggtccaggccggaaggtgaagccggagagatataatccatcaaatttgttgcagcgacagcattcgcacgatttttaacaaaaacaggttcaaaagcaccactattcattccctgattataagccaaagctaaaattttaaccgctgcgtaaggatcttttgagtcttttatgaaccctataggattccagcatttaacatattgccaaaaagcaatatttctgtaatcatgatacatttttataatagactgaaactcaaaacttgcccctatgaccggatcgcctataaaactattcttagaaacctgaggtataaaacaaggatagttcataaacatctccatccagcttcctcccatctcttgctgaaaatatcctgccgcaaccttgcctgtggtatcataacaattgactccaccattaattaaatcctgatttgggtatttttttgtaacccaacttggagcaataagtttactcccttcgcaacctgcatttatttcctgaatcgttgttgcaaaatactcattgatactcatcgcctcaaatcccatcaggtttgtaaacaaactgtgagaaacggccataccaatagcccagccttttctgttttcgggaatataaacatctactcgttcaccccacgcccaaaccgagccttcgccgatttttatttcattaccattaggtcccgcaggctttatggcgcagatactgctaaaacttttttcgcacttaaaattctcggtagctggtggggtatagcaagtaattccttttataggagtaccatttaatgtaccctggcccggcggaaacattcccggcacataattcatcgtgacactataagttgtagtaccaaccggcagaacatctccccaggtagtttttttaagctcaactataccgttatttccgttttgaatgacatccattccggaccacatgacaacattagaaactcctttccaattgaaaacaaagctatagtccggtatggaagtattcgttttattgtgaactttaaaatccaaaacaatcgtgtttccatgcttacctgtcatacaaaactcataacttacttgagaatatgcgttatttaggttcaacaaaaaaaacagtaaaagaaattgtattttgtaaaacttcatcattatttatctgtattttaaaggatcacgaaacaattcattttcgatcagcataaagaattagatgacctaacgaatttaattccgttagccaacttcatttttcaggaaattgaatattatttaatcctaaaaattaaccagcttatacgattttctttgtcccaaattatcggttatgactacaataaatagctgcttagtcaggaaacttctatcttctaaccataaatttctatggttttgactgtttttatagcttagtacagattgcccaagaatattgtaaacctcaacatggtcaatttctgttgcttcattatgtacagctatttccaatacattatttttaaaatgggcaattatatttttatcacccgttttatcaaaatgatctactgaaagtgatttactgaagtagtcgtgatacttattagaaaactcatacccgctgccacaactggcatcccaattgatagaccaggtcataactcctctcatttgcggctgcaaagaagatttcatggtatattttcttccggaataggtagtcccaaatcgtaagtaattaaaagcatcaatccctttgtcaggtgtgagatatcctcctgccggtgccgctcccggacaagccggaattgcaataactattttagaagccggcaatggtggaaaataaaatcctgtagaggctacattgaatcctttcattaacatatctgacatggctactaaaaaatccggagtggcttgagaataggctgtgttatctaaagcatttaaagatccggtgttatacaattgcaccatcaaaagatccagctcattacgcaaattatgaattaccggcaaaaaagatccggctccatctccatacaccgaatatccaacttgtacataataggtttccggagcagcagttaaaataaaacctgttccataataagcctttaattccttgaaagcatcaattacattcttaagttttgggtaggccgaaatcgccgaataagaaaaatcttttagcgctcctgctccaaaattcatagaaccaccttcaaaatcaatatcaacaccatcaaaattatactgatcaacaatcgcttttattccgtttacaaaaatatttttttggttaatggtgtttagtacaacatgaccattctgtccaccaattgacacaattaccggaatacctttatcccttaagctcttgatatcattttttaacaattgcggatcaaagactccattagtaaaaaatcttggttcatttactactaaaaccggagtataaccatctctattcaccgtttctataaatgaataaacaacaacattgtatttcttgtctgcaatttgtctaaagtacaaaaacggcgcacttgtgttctcccatccatgtgcataaccaacaataactttagctggcaacggattaaactttgagttaacaatagtaatcgattgattcaataaattctcaccgcctttattatcaattgcttttacaattattggatattctttatagctactaggagtaaaagtatagctatacgtgtctccagaaccttttatcataggaaaataagttccgtttacatttactgcaacacttgaaattgtaccatctctatctgtaacattaacacttattgaaactggctgaaaaccggaagcttgattgactgtattagatgcaggtgtaagccaggtaatttccggcaatacatttggacatgctgtacctgaacattgcaaataaaatggaaaactattttcggctgtagcattattagaggctgtagctgtagcttttagcgtgtaatttttattaaaatcagctactgccggtgtccatgttgccgtatactctatacctgttgtaggcgttcctgtaatatttaacccatttacattaaatacaaccgatgctattgtaatctttccatcatcagtagtcatgcttccatttgctttaagctgaataactgctccgggaactatagtaagatttgcagcagacgggctcgtaattgtcacttgaggggcagcagcacttgaattaaagttatattcttttgacgaaaccggaattggcaaattggccagatctgtaggataataaacaacagagttgttatcccaggcattcatttttaaacttgaaatggtggtataacccgaaaatattgcattgtcaaagctatattttccataggcatctgttgtagcaacaaaggtagcataaggatgtgtactatctgtccatggaagatttagttcaatttttgcacctgcgattggcacagaaccatttttgaccattccgcttattttattagttggagtggcattttgattaaaatctaaaactttgttttcacttaacgcactgtataaagtagaaactggtgaaaatgtcattcctgttttggcagcagtaatggtatagtctgctcctgctgttaaaccgcttatcctataagctccttttgaatctgaaactccagtaacattggctgttgccgaagctacagtaacggttactccggaaactgccgtaataccatttagcacggttcccgtaatggtataaagaggttgtgtaccctgtataacaataccggtttggttggcagtaacatttgttaattttaccggcgtaaaagtataggaaacctttaaagctgtaaccgcataatttgctcctgaaactactttagtaaaagtaaaattcccatctgaggatttaacggtttgtataacggcatcattctcatcttttagctgaactgtgacatccgaaaccaaattggtacccatttttgcagtaccactaatggttaaagttccctcaacggcaaccttaaaggaagcatctatctgatttaataatgcattaggtacagcacctctggtatcctgagacaactcccaaaccatacctccggcaaggtttttagacgttatatatttagctttaagatccatcgattgtttatcttcgtaagagataaactgttttaatgtcgagttgtataaataaggaactttggtggtgttatcccaatatcgtacccatcctgccgaagctgcctttggtgtaaccatcatggtattcggatctaaataaggatgcggagtggttacggaattccctactaaatcgcaaatttcaatacttcctgaattttcacatggagaacccgtatcccacgttccaagaggaggctgcggatttttacaggccgaaagtacatctcttggtgcagcaacgaatagtccgggtaaattaggattggttccattattggccacatgatcaaatttttttccataaaaaggcaatcccatgattaatttattggcagggaaaccaactacgttcaaatattgagtagttaattcatctaatgattccgactgctctgcaccataaagcggatcgtttgtgtttccgcttgcatacaatggcgcattgtaacaggttttatcgaaccagtttccaccgaaatcataaccaaaaaaagtaatataatcgcaataggtcgaaatatcttctgtcattccgaattgggctctgttgtttggtccaagatattgtttggatacatttcgaacattgttcccagccgcgattgtaattaatttatttggcattgcctgacgcattgcctttaataaataaactaaatttttgttgtcgtcgggactgtatttttgaggaggaaccggggcaccattaagaatctctgtaccatctgtacctcctgatagcggatattcccagtcgatatcaaatccgtcaataaagggataagtagcaatgaattttaccatatctgcagccaaagcagctcttgccacaggacttgcagcaattggagaaagatcctgacctttggtccatcctccaacagagattaaaactttcaaatgaggatacttttcttttaacttcatcaagccataaaagtttcctttcacgggagcatcccacggaattccgtcttccatatgctcaaaatcggcataggtatccaaacattgtaattttgtattctccggacgggcaggatcataacttgtaccgtaaaaagaataatttaaatgtgtcaatttacttccatctatcttagagacattaaaatccctgccataaatagcccattgcgcataataccctactacttttttattatgactcggctgagaaaataataagattggaaataaaactgaaaataaaaatagtaagtagtattgtttcataactttttttttcaaaattaaagctatgttatagaattaactttcacagtgttacaattggctaattacatgtaataattagcagcttacgccgaagcacttaatatttggcagggaaattttctgcttcaaaaaaaagactgctttgtcgaaacattataaaatgtgaggtatttctttttaaattcgccgttatagtgaaagtttggaataaataataaagtttgaaacgatacctgcaaaaggattttttacggctttaagaaattaacaaggtttgcaggtttgtgcccgcaggatattgtttcccccatgcttcctcatttgaactccagcccttatctacatcaaatgtgactattctggaatcattcatcaaatcaaaatcaaccaatattcccggactttgcgaaataagcattaccgtattgttttgaggattgttgtcactaaacattaagaaagctttattgtcaggagcaacctcgatattttgcttcccgaatgttttaaacgtacagctgccatagtattgaccgtcattggaactatagatacaaattccagtggcatacactgtaccggaatcattttgaatgagtactgttgagttgtcattattggtatctactgacatagctccaaaatcctgaatcagcaatcgttgttttaattctattttataatttgttccccctatactgcttcttgaagttgatcttgacatcaatctatcagtctccggttgtggaatgtatatggtttgattttctataatctcactggtagatgcataagcactaagacgatattcccattcgatcattaccgatctgaggaaatttttggtcacgctccagcacagaggcctgaactgtgaaacatttctggaccttgaggccagaaaacagcataaactatagtttcctttatttaatacctcaacggtttcctgagagaagttaattattagtctattggtcatcctgtttttttaaattaaaattgaaacaaaagaattactcctcatccaaattcagatgaagagtaattcaaacaacactaccctatattattacttgcttctttcgcttagttctttctctctgctactggtgttttcaatcaatagctttttcaaatctgtataagcattaaagttttgcaaccaggtacctccatctgcttcccagccctcatttactgtataatcaacatcacgtgagtccgaatcggtaagatcaataaaggcaccggccgacattgctttggtgattacagtcgccgtttctatcttctctgttgaaaaaataagcgctattttagtaattggcgtgatcactctggcagaccctgctcctaaaattggaaatgcacacaaaatgtttgatttcccatttactaactgattaataccaattgtaaaacgctgtttatcctcgtttaaaaaagatactgttcccggataaccgtttttactctttgtgatattaccggaaccctcttcaatagttaccaattgacctaaatcgactttgattgtattactcgcttcaattagaacctgaggtgctaccgtacttgttgaattgtaagcctgaaagtcttcctgccaggtaattttagttttggtcagtaatttttctgccggtaaatgaaaccatacggttggagaaccatcacctgatgctgatactgatttaaatccgtataaagaatacccctcagcttttaaaatttttacatcatcaggactaatattaactgttgttgtgaaagttgacataatttatttgtttgtttggccctactcatgaggcttttcgggtaacgccttacattattttctgaatgcaaacagttcgttttttaaagtgggatctgctccactctttttgataccctatttttaagaagcaaaccaaatcatccgcaaacgcaaactttacttattttgtaaatgttgcagtgcttcccgctttagctgtacaagtacggcctgtcatgttgctgccattatctaaacctaccatatagtggtctcctactttaataaattctgcggggtcaatacccgtaactcttaaatctatagcgttaatagcatcattacttctgcctgtagccactggtttggttccaagctcatttttaattaatacatcaatcataattctggtttttaaattaaacaataagagttgtgacttttatcatagtaaccttacaacgaaattcaaaacatttgtggtcactgctcttttcaagattgtcctttcttcctgcgtcagtaaaacaacctgtgtccgtatcaatcaagctgtatttttcttttttctttgagataaaaatcccatttacattgttgagacgaattacatttttgccttactattgattttctcatttttgcgatctgcagtatccctccatgagttttttagattcaggtagtacaatccttaattctaataagtcaaaattatctgtttattcctgcttttatttgtacagaataagctactttttgtcaatttgaatcataacacttttcttaataaattaacaaatggaaataaatggttatctgtattatacttacttggtggataattaaaattctgtttgaaaacacgggaaaaatgagcgatatcaaagaagccggcaagagaggctgcctcagtaactgatttcttttgtaccactaatacctcagcagcaaattgaaggcgtatatcacgtaacaggcgtatagccggaaatccaaataatgatttcaccttgcggttaagatttgacggactcataaaaagtttcgctgacagcatctccatacagaatgcctcgttatcaagattatcgataacgatgatcagtaatttcgccagccatttgtattcttcttttaactgaatcagcttgttaaaacactcattgcttaaaggaattttccaatcctcctctttaaatcctgtaatcaaacagttatcgcgatatgctgaaggagaaagtccaaactcttgtttgaatttacgactgaaagtggccacaccactaaaaccgcaataaagagccgtttcttcaatggagtatttattggtttctaaaatatctttggccaactgcatcctataacacaaaatgagtttccctggcgagaaactcatttgattttgcactttacggttaagctgtgctctactgatcttcaattgatctgctaattgggaaacaccaaaagaagggtccgttttttttcttgcatgatggcatcaatctgccttaaaaaattttcgtccgataaactaacgcttttttcaatctcaagttctttcatagtttgtacgctttaaataatactttatcatgtttaaataaagacaagccgagaaaaagaactgtaaaacagaaaaacatttaaaaaccaactaaaaaaatagtgtcgaactaattttcaaaaagggatgttccatactgtttggggggcagcatactaaatctatggcttttatatctttatctgttcaaaactaaacgagccattcaatttaacaccggaaaatgtcacgagatctctatatgatggcacgaaaacaaataaatcagtcataagatttttcttaatgctgtaattgtaaaagtctctaaaacttatattttttttgcgaactgttcgctggtcagaaactcaaaccggaagtttattgaaaagagccggattactgtaagattattagatatatttaaaaccggggtagaaatgcttcggtttttatgattcgatctgactaccaataccaaagataaatttacttatcttcaacattccttttacaaaattaaaagccggtaactaaaatttagttccggcttttgttgaattaatttatttttcttttaagcaaatctttcgtctttgtagacaatggtattatatgagtaaacacatgactcagactatctggttttacactatttccaccactgtgacaaaaaaagcaggacgcaactgatttgtaatttccatccggaacagaattggagcttggagactgaaagaaggtttccatagtactatttgctaatcgcccagttccaattgcgtctcctttatttccaccgtaaggatatgaattaccattgggccctgcaccaccaaaagtccaggttgcacctattagtaaataattctttcttatatcattaccaaccaacatcttacgtatactgttattaatagcaataacttcactattcgaatctgcaggagttctattctcttgattaggaacagtatcagaagcaactccccaagccatcactctttttatattaggcttgtctatcgttgagtcagtaatttcaattgtattgtttttaacggtcatcttctgcgtattttttgttgtatcgtcggcattaacattaaagagccagtcttttcctccatccgcttttacttgcttgattttaccattaacatctctataagaatacgcttcgtttggtgcatttttttggtgttcaaaagttgcccagatcatttcaggatgtcctgcaacacttcctacgatgtgcattccaaccaacgccagtgttgctgttgtggttttatttgttagcttccacaacttagggtctgatttgtcgtatacaggaatcttagctttgattgtaacataactctccggatttggtaaatcctttacttctacccatgatgtttttaattctattgccaaagcatccggatccggtggagcggcaaaaccgctgctctttgcataggcaagaatactatctctagcactggctgtagtaggaaactgattaccatttaatttcttgttttgtacacccgtcaggaaataagcataaacatcgtttaccattgttatgtaatacaccagtgatttatttaccgcaactaacgctccgttagaaccagcctgtccttgttctgtatcaattacatctccctttgcatccagaaacaaagttttattatctttagttgtaaactcctgtacaatgttttcacgatggcctttagtatctattatcgctttaggcttagaaatagctttcccttttgtatctataaaagaatgcaccccattggcattggcaataaccccacctactatcacagatttatttgacgcatctttaaccgcttcatttttactttgaggttctacttcaaatgctcttccttttttatcaattataattggaagtctgtttggtcctgtttggctaatattgctcacagcactcaataaagtatttggtttatgtggtgttaaaacacgttttttggtaaccggatcttctgcagaaacattatagaaaacgggagattctattacagtgccaccacctttatagtcaccgtcggaaactggagaagtaatccataaaaacatttgctcagaccatttataaaaatcgcaattatttctatgtggaaaatcaacactgtttgcaggttcaacaagtccattttcggtaattttttttgttttaaaccaggacttgaattcctcttctgaaacactgcatgaatcctgtacatcttgtggcagatattcgtaatcggaatcaacctttgctagtatatcattttttttgcacccaaggattaagatggcaaaaaccgcgataaccataactgttgtttttatatttatttttttcatgatttggtgtagttaatgggtgtttcttttgtttgttttttttgaatcgtctgaagtttttaattatcagaacctcttttaacaaaaaaccgcccgaaacaggcggtcattagatttcaatggaataagatttttttcttaattcagtattcctgtattgaattgtttggggagaatttagtttctatgccaattcctttttcaaactctttgctgactttacaggcacattctcgatgtggtgattccaataagagaatcctcctgttccgttccatgaactatcgattgctaagtgtgcctcaaaattggccaaaaaagaaccaattgcaggaggaggaacagattgaacatattgtccgcttaggctaactacctgagtaattttaccgaatccggttgcatatattctacctttaacatgaacaacgatatgactatcaggacctggaatggcctgtgtaatcactactgtacccgaaacagaatgttgtgacggtacaacaactaaactaaatgatgcaattggagcacctggtgttcctacattcccgattgtgccttttgctaaataggcacctgctaataaatctgccataatcttttaatttaaatttttcttactcgtggggcttttcagataccgcctcgttttttatagtgggttctgctccactttttatcattggatcaagtttctccttattcagataccggctcgttttccagagtgggttctgtcccactttctattacgggttcaagtttttctttttttggagaactaacacttatctgcacgtttacctgtcctatattatctgtcagacctgcaccgtaaataccttttaaatcgtcattaatgcataattctaattttccaactgatcccggtggcgtgtttgctcccagtccgattaagaaaacagcatctccaattttacctaccagtgctccctcgtttgcccctggaagcgcataaccgggtttagcactaataaaagttgggtttccggccgaattgtacaaatgaccgttattgatatttggattcgccgtccatagaccatctttgtattttatggtagcaactctactaggattcaatcgaacacctgtatccaaccatggataagaaggattaggattatcaggagtacttggattcggttttgcctgaacggtaaaatcaactggcggaaccgcaaaattgcaagccggaattggcgttgtaaactcctcataatcaaaataatctgccaaagcaagactcgttcctagacctacacctgactgcgattgcataaaggttattggtcggctgcgtcttccggttcgatcgaaagggctataccaggtccataaataagtagaatcaggataattatttcccgaaggtggaaaatgcacaccaacaacagtggctgtattacccggacaaagcgcaggatttctcacaatagtggcatgaatttttccttgtaccgccggaatctgaacccagtttggcggttgctgcgggaatggaaattttccaaaaccaatcgcatttgtgattctgtctcctaaataattaattaaaaatcctgctccactattaggcggaggagtcattccggtaggagttggtccggtaagaagcgcttgttgcgcagtaaatggatttgtgggattgtaggtatatttcatcagtgtactctgacttctgtctgatgaaacgcgatattgcgaattgtctctccaattgtataaaaccctcgtaggaagaggattgaatgcttcattgaccggtgtcatgaaaacagtcatcccaaaattagtattccatgtaaatagctcatagttatcacggtttccaaatgaaaaaccttctacaaccggaagtaccaaaggtgagtttaaaggattgcttgataatttctcaaaagtagagaaataactaaaggagaacatttgaaataaggccagctgattaacatctcctaaacccgggcgtgcaacaggtccttgtccaaacataagacgcaccggaaaattggttttatggtcaaaccacatccaggtagcaggtgcaggactgctgttccctaccggaattttccaccaatctactttttgtgctttcatccagttcagataactggttccggaacattttgctctactgctttcatttccaaaccagtttgtcgttggaattctccaacctacattgatcggtgtatagcggattccgtcggtcgatacttctgtttgagtgggcgttactctgtaccaccatcttctgccggaagcacctaccagcaaagcgtttaatccaagtccttcggcataataaaccgtagcggtacaaatttcaaaaaatgggctctctttgtcggcagtagtactattactctgcaaggggctaaaagggtgaagtacacaagtacatttccaaaattgtggaagtctgggctgaggccctgtaaaaggctccaaaaccggatatcttgaatctggtatcggatccacgcatgttttcgaggaagaggctaagtctttcatggtagtttgcttttggggttactaattcggattgtttggtattattttgatgctcaacggataatcttatcgttctgatttcctttagaataactatacaaaaccagcatttttaattttcccgattaaaattacaatgcataagaaatcctacataaaaaaatgtcatgagactggtttttttatccataaagcgaataatcaatggaatagaattcttttaaaaagggaataaaaattacaaacttgcacaaaaccactatctccgatccagtagcacgggtgttttagtcgtattgggatctatgtacagatctgccgccgtcaccagcaaaacctcaacatccataaaaccgtcttcgtagttcaatagttttttcaatgctgcacctttttcctcaacgaaagcttcttttttatcttcagaaacattttgtacaattaacatctttacaacatccttaaaatttttattggttgacaattgaatctgaaaagcggttgcttcatttgtaagcgacagaaatttatctaagtcgtaatgctgttcacaaactataaaagattttgcctctctggattttaattccaaaaaagattttccatccagttccacccatcggcctatatctccgatggcatatcgaaaaaccggaaatcttttacggaatgtattcgtaaccgctattgtaccgtatccatcctcatcgggatttatgatttcaacaataatacctttaataacggaaaacaaggatggcgttttagtacaatgtgaccaggcccaaattccggtttcggcagagccatacatggaatatacttcctgaaaacccaatacctgctgcaaaaacttttgtgtattaggtcgtaaaaactctcctgcataaaacaacttcccaatttctatttgtctgttgttcctttgtaaaaaatgagcaaagcagattagttttgaaggggttccaaatataaaatcaggtttgaaatgacgggctgcctgttccatatcggcataactggcatgggcacttaatgccaaagtggttgcctgacatttttcaagaatatcatccataatagctgccgtgcgatacatatcggaataaccaaaaatgttcagggcaattgttttaggagtaaaaaaattatttcgggtgagttcgcctgccaatgcaagacgctgattatgattctcctgaatatcaaccggaaaaaccagtggcttttgagtgcttccgcctgagcgtacgagatacactcctgttttttcttcctcaagtttaaactttgtctctaaaattggcattaactcttttttactgagtacaggagctccggcagcaaaatcatttcctttgtaaaattcaatatacaacggattttgtttggccaattcaaagtaatcctgtaattcagaatggtctatttttggagggatacaaacgggatacataaggagtcgttttaggagtttcttctttttaaataataactgttcttgaccaataatgcgaaatgattgaaaataaacagccctttttgctgccaggagggcaatcgctccatggcgtgttccagccatcgttgcgaatacattcccattaactgctgatcgtatcgattggagctttttcgataccgctttatgatgatcgggatttcaattgctttccaatctgtgggactaattctggacaaacttccttccacttcccgtacttcgatgcaggctttatttagtaatccaactctggagcgttgaggtaatttttttaggacacggtaccataaatcaatgccttcgcttatcgaaacatccctttcataaaaaatatcttcaagatgtttttttcggatcacaacattactcccgaaacccataataaaatcaggagaactaatcgtatgcaatggatccggaattaaaaatagttcctctgaaaagggaatcatttctttttcaaatgatttaatattcggtaagtaatgatttgaggggaggagcagaatgccaagtatcagcacatccagattctcctcctccatcatagaactactatcgtgtaaacaagttggtaaataacaatcgtctgcatccagaaaactgatcaaatctccggttgctagctcaattccaatatttctggcattactcggacctttattctcttccagctcgatgatctgaacatctgtctgcaaaaattgaggggaaaaaaaagaaagcgcgtcttttaggtataccaaactcaggtctgaactacaatcatcgacaataataagctctgacacctttttttcctgaaaagccagagaacgaatggtatcataaatgtaagcttccttattataaagaggtatcacaacggtatgcttcatattttgactactgtgctattggataaatcaaagctcttccctgatgcacattcacaacagattcatctgatccccgaaacataccggatccataatttttatcgtctttacacaacagcattcccactaaataaatctgacgattgttttcagcatcgtcaaactctttttgatctacaaaatgctgaatcagatagctgttccagttttctctcactatagtattccagttttcatcagtgcaatcgcttttcacgtaggctccaattccccttccaccgctgtttagttttaaaatcagattttgctttgtatttgtaaattcatcacattcaacaggatcggtaataacaaagcttggaataaggtactctttcaaaaaattgtactcttccttactcaggtagtcctgcataatcccggcatcatacataacagccaaaactcttttgtcatgaataaggattaaagttcggatgtcattgaaatagcaattctcttcaattaacttgtctaatacatcggggctaattttttttatttcttcccgatccatttcgagtataaattgtgaaaccggtactccgttggcttctattgaatcctttacaatcgcgagttcctgaggttttgcagaaattaattcaatatttaattttgccaactctctttgtgcattaaaaatatcgctgcctttttcatcatcatgaataagagctacttttttatgaggagcaaactgctgagacagatcgtcgataagattttttaaatctgtacctcctgcagctatttgatctttatattcattggtttgattgttgatcaggtgtaaataataactgatcatccatccatttaacggataacgtgctcctatttcacaaatttttgcctggccattactatcatataaaaaatcagggcgataaaaaccctgattatagctttggctattacacttctttaataaagcttcaaggtcattctccagttgataatagttccggattctgctgtcttcaaaataattcaaaacaattgctgtacaagctttgtttaaaatagcgcacaggcgatccatcggtttgttatactccggagacaggacgacagacgaattagcaaaagcatctctgcctaatatgttgatattctgaaaatattcaaaaaacaactgattccatttttcctgttgatcggcttggttttgctgtagtttaatttttgacatataagattgaagtttatttttttgtaatagataattagatacgccgatttaaaaactcaattcttccacttccaaaagatccaccatcacggccgatttttttgctaaatagtcgttgacaattgcttccagatcatacgattcaagatcgatattcattgccttggcgtagtgaaaaattgaactaacagcaaaaaagaagtgatttttctctgttggtccacagtgaacactgatccatgctaatgttttatcgcactcttcttctgtgtaaccgtaaacattaatcaaccaggactggaattttggcaagatcagttctacttctccatgcgtataaatttcatgtatcaaagttgtcagtaaagcaatcatgatgtctttattccgtaatgagttctgatctttccatgttttaaaatcacaggcactttgattcagataacgtcgggaaagccagtcatcatctgtacagattgtagtggccatagtataaaacagctgcgaatgcaaaattctgcccaccactgccagatcttcatcaacgatacggtttaaactggtgatcgattgcaatagtgctttttcatctgcaataggttgatttttatgaaccagcatggtcatacgattgctgattccggatactgtcattgcactgttattcgtttggctccagctatgaaagaaacgctgtaaacgttctttatcctgaactttagaggtcagctgattgaaacttttctcaatttttgaaaatgcttcctcctgatttggaaggaattttaataattggtcttttaaatgtgattcttccattccttcaagaaccggaagaataattgaacttaaacttgccataactgttttgattttaggttaattaatgattttgatttctatggtatgttggtggtttttaatgaaccgattaagagcggtagtatttaattttccgaagcacatcaatatctttaaagtgatattgctctaaccagtcggcttcatcgaaaaagatgcagctggactcggcaatgacaataatgtttttatggagagagatgcgatagagtttatctaacaattcagcatattgaaaatcgtaaagaggattgtacagataaaaaacatttccatctgagatatctgtttttaaaatatcccctgaaaatgctgtaacattcgttagcccttcttttttgattaaagcaacacaaactttatttcgctcttcaagaatttcgattcctttaaactgaacatccggatgttttacggcgccgtataaaatgatatttccgtaaccggaacccagatcataaaataccgtttgtggagccattggaagcgggtcaaaaagagcctctaagaaactggaagatccgtatcggtaagaatttagtccgtacttaatcgtaatttccgacagacttaaaccctcttcaatatgatgcgaatactgatcaatttctgattgaatacttcttaattgctccatactatttcatcattaagaattccagtttttccagtgagcgttttgctttttccattttagcggcatattcatcatttacctctttcacgttgctgttacaaaaactgcaaacctcttcttcttcatagacataattatcacagccattgcataactttaaggctttaggtattctcggaactcttgctgtcacatcaacaataggaacaggagtttcactataaggtgactgtatttctacaattacgccattttcatcttccacgataatttcaaaaagtcccatatcgaaagagtcacctggtgcttcctgtatttttcttattcgttccttaagccctttcttttttaattctaaagcacgatgatggcaaaaaggattattccctctcttaccaaacaatacatgacttgtccaggtacagcccgccagacaagaagattcataataacagcctttacaaccgccccataattcttctttatttctatatctggaaaaaaccatctcttcactgtatttccaaatatcctccagtgccatatcttttacatttcctcctgtataggcacttgttggtaaggaaggacagcctttgattttaccatctgcttcaatccctattccggtatgccctgctgaacatcctgtgtaatatttttcattgccctgtctccaaatgtgttcatacggtccaaaataacctatgttatttcctgcttgtattaggatattatgagctaaggcttttctgtaaatcacaataagctcatcgtaaaaatcaattaattcataaggctgaacgatcagctcatctgcattgtctacggcattccccatagcaacggcaagttgtatctgccagttttttacgttattttcaatcaaaacatccaaaagctcattcatctcatttttacttctttttgtaattactgtatttacgctggaagttatatggtgctttttaaggagttctaggcaattaacggcatgttcaaaagaatctcttcttcctcttattttattatgggtatcaggcattccatcgatggaaacccctatattgtttattcctgctttttttgcagcaatgattctttcttcgtttaaattataggcaccggactgcatagagcattcgatcccgctttgatgtattctttcgataatctcaatccagtcttttcttaaaaaagcttccccaccaataatcgaaatttctctggtaccaagacgtttaagactatcaataaccccaaaacattgttctgtagttaattcgcccggtcttacttttccggctctcgatccgcaatgcgagcatttcaaattacaagccagcgtaatttcccatacgacatgtaccggagtagccgttgcataatcatcccttactctgtatcttgttgaagtcttactagtatccatcttatatcaattttacttatattttagttcaatgctttctggtataatgccgatgtaatatgaaaatagcgcaatgcaattggactatattgaatacacaatcggtattagttttgtttatggtttgacaattatttaaaagacggtttaaaaagtaaaacttgataaaccgtcttttttagattaccttttctttttcaaggtatcaatagcatcaagcaattctactaatgctacatgcaaatctttttgttctcttatggttttcttagcttgttccgctaccgcaaccattttttctaaatcattcgaggcaatcgcctctctgattcctactccgtaaagtactgttgccatactattttgtttttggattattcctactctttaggtttttcagatacccccttgtttttctgtacaagtcagcttatttcttgttctttagagaatctattgcgtccaataagtctaataaagctacagtcagatctccatgatctctaattgtttgctttgcttgcttggcaacagcttccatcttggccaggtcattagaggcaagtgcttctctaactgcgacaccataaggcatgattattcccatagttgttgttttttagttattatttgttttgtttgaggatttatcctttttcaggaaaaaatttctaccggagaaactttctgattccttaattactataaccaaactgatgtaggaaaagtgccggttcgtttggactcaagcaagtcaaattacctaaagtcactgttctgccttcgttattttttccggtgataataatattcttcgctccagccgttaatttgcctaaacgatttccggtatttacttcgctacccatttcatgaggtgttcctgttctggtagcgataacatttccggttccattttcgattaacactctctgtcctattgccggtgccggaaataactgagaaactgtaatgtcagtaagttctcccagtgtgatataaggaggtaaagtttcagcattaatagtttcagattcaggcttaccaagcgtaatagttcttccaaactcaggttgtgttcccgcatctgtacaatacatccacggagtagtaaaaggagtcccatcttcagtctctccgcttgctatatatctttggtgtacacccaattttggtttttcagacagggtgttcaaatccaggttataaaacactgatttaataagtgttcccaccgcgtaggtaccagtagctccttcaactacaggaagaataacgggtccaactcctcctccatgccattctacataaggatacacatttacatttttaacttttacaggtattggttgcataataatagtttttgtcctactcatgaggcttttcagatccgccttcgcttttaactgtgcgaaacagtccgttttttttaagtgggttctgctccacttttttcaatctcaactaattaataattaactagttacttagataattttctttcattaaatttctatatcaaagctattttagatatgaagatctaatccatatatcactctattatgtaattaacgaggacttcattcatttaattcggttttatgataaccgtcaaagaccagcgacaattttagaccttttttaaattattccttttctctttaattcaagtagcatgtcttcatgtgtcataaaattaccctcttcaaactctcgtttggcttgttcaatatcagccttgagctctaatctgaaattttcttcaggagaaagtatttttgctatagacaatacttcatccggagtgaaagtctgagattttagttttcgatagaaagtcggacttggaataccaactttctcgataatataattttttttatatggagatttatcaattaaattttcaatactattcacaatattcatgtaggtaattatttcctgtatcatttttgatatatttttacatcgtttataatacaaatataaaccatatacgaatgcaacttatttatttgccataaaaataaaacccgacaggttttaaaaacctgtcgggtttaataagtatacttttatttcttcgccacaaatctgggatcagattccattacagttccgcagttattgcaggttctcaactctaacgaattataaaaatgttcgaaatgtggcagaaagtctttttcaatattatgcaattcaaaaagcacttcatataatttatgattgcaatgatcacaatgccaaagcagtccgtctgtatatccctttcctgcacgtttacgttcgattaccaatccaattgaaccttcggaacgaacaggtgaatggggaactttagccggatgaagatacatatcaccggcatgtaaatccatttcctttcgttctccatcttcctgaataatcacttttatactgccttccaactgataaaaaagctcttcggtttcgttataatgataatcttttcgggcattcggacctgcaacaatcatcacgatataatcaccggaatcaacataaagatttttattcccaacggggggttttagtaaatgacggttctcatcgatccactttgttagattgaaaggtttagctattgccatttttaaaggtagtaagtttctaagtagctaagttaaggaaaagttttcagttggagtgccagttttcagtcgcagtctcggtctcggtctcggtctcggtctcagtttacagtctcagtttacagtctcagttctcagtctcagttctcagtctcagttctcagtctcagttctcagtcccagtctcagtttacagtgatcaactgagactgaaaactgaaaactgcgacttacttaacctctttaatcaaatagatataaaccggaaaatggtcactaaatccaacttctgtcaaactatgtcgcagcggataccctttatacggtccggaactctgaaccagaaaagatttattgaaaattcctgctttccaaaagttaaaagtcgaaaaatcagatggtataagtgactttgtaatgatgatctgatcaaaaatatcccaggaatctctaaatgcaattgtgcccaaacctttatcgagcattgctgcaaagggattaaaaagcccgaattcctccacttctgatttttttttttttgcacccaaaacattttttatacttttattaaagggaccatcattcaaatcacccattgtaatcactttagcattgggatttatttgctgtagcgaatcgataattcttctgtttaaacttcctgcagcttcccgaaaaacactgcttgctttctcccctcctgatctggatggccagtgattgacaataatatgaatttcctctccttctaaaaatcctgaaattaaaagctgatctctggtaaaaacacgattcttatcatcggttttaatatcgatatcatcatcctgctgttcgacttccccttttttatcagaatttttttttagataaatacgcagcggaatattggaatatgacgtgggtctaaagtattttctctgatataaaagcgcaacatctattcctcgcttatccggcgaatcaaaatgaatgattccatagtcaaaaaggagtaaattcggttgtttcaccagatcttcgagaaccgtgcgattttcaatttcggcaccgccaattagtacgggagcattggagttatccggccttccaatttcagataatactcgggacaggttttttaatttcttttcgtatttttccatcgtccaatgctgagtcccattgggtgtccattcattatcgttggtagtgacatcatcattagtatcaaagagattctcaaagttgtagaatgcaatagtatggatcgcatatttttttggctgtgcctgaaaaattgtaaaagataaaaaagcgagactacagaattgaaaagaaattactctcatataacttaactctttaaaagattcaatttaaacaattaaattatattgtaagaattttctaatgtttttattttttaaaatatctatatttgttttatctttacgaatgaaccagcagaaaaacatgaaagcgagcacccctcaatactacagaaactacttttctatttataaacttgcatttcttatttttgctttacaatccatccactgtcaatcacaacaaaacatgataacaccaccttatttacaaaaaggagatactgtagccattttagcaacagcaagaaaaaatatagacgataatctgaaacctactatagatttattacacagctggggccttgaagccgtagttggaagtactattggtttagattttaaccaactggccggtaccgatgaacaacgtgctgccgactttcaaaaacagttagacaatccaaatatcaaagcaatctggtgcgttcgaggaggttatggaacggtgagaatgatcgatttacttgattttaccaaattcaaacaacaccccaaatggattgttggttttagtgacgttaccgttctgcacaatcatttgaatacgatgggctatcagtccattcacgggatcatgcctgtaacggttccaagagctactcccgctgcggtcagttcaatgaaatctgccttgtttggtgaacctatttcttatactattgctccggataaaatgaaccgctttggaaacgcaaccggagaattagtaggtggtaatttatctattttatacagtttgttaggttctccttcggcaattgactgtaaggataaaattttgttccttgaagacctggacgagtatctttatcatatcgatcgaatgatgatgaatttgagacgtaacggatgtatcgaaaacctaaaaggaattgttgttggaggcatgaccaaaatgaaggataacgaagttccatgggggaaaaatgcggtagaaattgtagatgatgtgaccaaaaagtacaatattcccgtaatttttaatttcccagccgggcacattcaggacaatagggccttaattatgggaagtaccgttactgtaaatgtaaatgaaagcggaagtacggttacttttcaaaaataatagcatctgggattttttctctaaagaattttaaataccaccaatcataatctcgcacaaacgcgaagtcacaaagttatattcctttctttgcaacttcgtgtctttgcgcgcaaattactccttacagcgtaaaaaaatcacaacccgcaattcatagttaaaagatggcagaacacaacgaacttgggaaaaaaggtgaagatcttgctgtggaatatctgaagcaaaacggatacaaaattctcgatcgaaactggacttttcaaaaggccgaaattgatattatcgctgagaaagaatctattttggccatcattgaagtaaaaacaagatcgactctga
